(19) United States
(12) Patent Application Publication
(10) Pub. No.: US 2024/0026374 A1
(43) Pub. Date: Jan. 25, 2024

(54) CLOSED-ENDED DNA VECTORS AND USES THEREOF FOR EXPRESSING PHENYLALANINE HYDROXYLASE (PAH)

(71) Applicant: Generation Bio Co., Cambridge, MA (US)

(72) Inventors: Leah Yu Liu, Cambridge, MA (US); Russell Monds, Cambridge, MA (US); Matthew James Chiocco, Cambridge, MA (US); Nathaniel Silver, Cambridge, MA (US); Phillip Samayoa, Cambridge, MA (US); Douglas Anthony Kerr, Cambridge, MA (US); Jessica Lynn Keenan, Cambridge, MA (US)

(21) Appl. No.: 18/025,926

(22) PCT Filed: Sep. 16, 2021
(86) PCT No.: PCT/US2021/050695

§ 371 Date: Mar. 13, 2023

Related U.S. Application Data
(60) Provisional application No. 63/078,954, filed on Sep. 16, 2020.

(51) Int. Cl. C12N 15/85; C12N 9/02; A61K 48/00; A61P 3/00

(52) U.S. Cl. CPC C12N 15/85; C12N 9/0071; C12Y 114/16001; A61K 48/0066; A61P 3/00; A61K 48/0016; C12N 2830/50

(57) ABSTRACT

Described herein are ceDNA vectors having linear and continuous structure for delivery and expression of a transgene. ceDNA vectors comprise an expression cassette flanked by two ITR sequences, where the expression cassette comprises a codon optimized nucleic acid sequence encoding a PAH protein, in combination with particular promoter sequences and cis-regulatory elements. Further provided herein are methods and cell lines for reliable gene expression of PAH protein in vitro, ex vivo and in vivo using the ceDNA vectors. Also provided herein are methods and compositions comprising ceDNA vectors useful for the expression of PAH protein in a cell, tissue or subject, and methods of treatment of diseases with said ceDNA vectors expressing PAH protein. Such PAH protein can be expressed for treating disease, e.g., Phenylketonuria (PKU).

### RELATED APPLICATION

[0001] This application claims priority to U.S. Provisional Application No. 63/078,954, filed on Sep. 16, 2020, the entire contents of which is hereby incorporated by reference in its entirety.

### SEQUENCE LISTING

[0002] The instant application contains a Sequence Listing which has been submitted electronically in ASCII format and is hereby incorporated by reference in its entirety. Said ASCII copy, created on Sep. 16, 2021, is named 131698-08120_SL.txt and is 633,329 bytes in size.

### TECHNICAL FIELD

[0003] The present disclosure relates to the field of gene therapy, including non-viral vectors for expressing a transgene or isolated polynucleotides in a subject or cell. The disclosure also relates to nucleic acid constructs, promoters, vectors, and host cells including the polynucleotides as well as methods of delivering exogenous DNA sequences to a target cell, tissue, organ or organism. For example, the present disclosure provides methods for using non-viral closed-ended DNA (ceDNA) vectors to express phenylalanine hydroxylase (PAH) for treating disease by expressing PAH in a cell or tissue of a subject in need thereof.

### BACKGROUND

[0004] Gene therapy aims to improve clinical outcomes for patients suffering from either genetic mutations or acquired diseases caused by an aberration in the gene expression profile. Gene therapy includes the treatment or prevention of medical conditions resulting from defective genes or abnormal regulation or expression, e.g., underexpression or overexpression, that can result in a disorder, disease, malignancy, etc. For example, a disease or disorder caused by a defective gene might be treated, prevented or ameliorated by delivery of a corrective genetic material to a patient, or might be treated, prevented or ameliorated by altering or silencing a defective gene, e.g., with a corrective genetic material to a patient resulting in the therapeutic expression of the genetic material within the patient.

[0005] The basis of gene therapy is to supply a transcription cassette with an active gene product (sometimes referred to as a transgene), e.g., that can result in a positive gain-of-function effect, a negative loss-of-function effect, or another outcome. Such outcomes can be attributed to expression of a therapeutic protein such as an antibody, a functional enzyme, or a fusion protein. Gene therapy can also be used to treat a disease or malignancy caused by other factors. Human monogenic disorders can be treated by the delivery and expression of a normal gene to the target cells. Delivery and expression of a corrective gene in the patient's target cells can be carried out via numerous methods, including the use of engineered viruses and viral gene delivery vectors. Among the many virus-derived vectors available (e.g., recombinant retrovirus, recombinant lentivirus, recombinant adenovirus, and the like), recombinant adeno-associated virus (rAAV) is gaining popularity as a versatile vector in gene therapy.

[0006] Adeno-associated viruses (AAV) belong to the Parvoviridae family and more specifically constitute the dependoparvovirus genus. Vectors derived from AAV (i.e., recombinant AAV (rAVV) or AAV vectors) are attractive for delivering genetic material because (i) they are able to infect (transduce) a wide variety of non-dividing and dividing cell types including myocytes and neurons; (ii) they are devoid of the virus structural genes, thereby diminishing the host cell responses to virus infection, e.g., interferon-mediated responses; (iii) wild-type viruses are considered non-pathologic in humans; (iv) in contrast to wild type AAV, which are capable of integrating into the host cell genome, replication-deficient AAV vectors lack the rep gene and generally persist as episomes, thus limiting the risk of insertional mutagenesis or genotoxicity; and (v) in comparison to other vector systems, AAV vectors are generally considered to be relatively poor immunogens and therefore do not trigger a significant immune response (see ii), thus gaining persistence of the vector DNA and potentially, long-term expression of the therapeutic transgenes.

[0007] However, there are several major deficiencies in using AAV particles as a gene delivery vector. One major drawback associated with rAAV is its limited viral packaging capacity of about 4.5 kb of heterologous DNA (Dong et al., 1996; Athanasopoulos et al., 2004; Lai et al., 2010), and as a result, use of AAV vectors has been limited to less than 150,000 Da protein coding capacity. The second drawback is that as a result of the prevalence of wild-type AAV infection in the population, candidates for rAAV gene therapy have to be screened for the presence of neutralizing antibodies that eliminate the vector from the patient. A third drawback is related to the capsid immunogenicity that prevents re-administration to patients that were not excluded from an initial treatment. The immune system in the patient can respond to the vector which effectively acts as a “booster” shot to stimulate the immune system generating high titer anti-AAV antibodies that preclude future treatments. Some recent reports indicate concerns with immunogenicity in high dose situations. Another notable drawback is that the onset of AAV-mediated gene expression is relatively slow, given that single-stranded AAV DNA must be converted to double-stranded DNA prior to heterologous gene expression.

[0008] Additionally, conventional AAV virions with capsids are produced by introducing a plasmid or plasmids containing the AAV genome, rep genes, and cap genes (Grimm et al., 1998). However, such encapsidated AAV virus vectors were found to inefficiently transduce certain cell and tissue types and the capsids also induce an immune response.

[0009] Accordingly, use of adeno-associated virus (AAV) vectors for gene therapy is limited due to the single administration to patients (owing to the patient immune response), the limited range of transgene genetic material suitable for delivery in AAV vectors due to minimal viral packaging capacity (about 4.5 kb), and slow AAV-mediated gene expression.

[0010] Phenylketonuria (PKU) is a rare, inherited inborn error of metabolism caused by a mutation in the PAH gene. Phenylketonuria (PKU) results in decreased metabolism of the amino acid phenylalanine. Untreated, PKU can lead to intellectual disability, seizures, behavioral problems, and mental disorders. It may also result in a musty smell and lighter skin. Babies born to mothers who have poorly treated PKU may have heart problems, a small head, and low birth weight. PKU is due to mutations in the PAH gene, which results in low levels of the enzyme phenylalanine hydroxylase (PAH), i.e. subjects with PKU have mutations in PAH that render its enzymatic activity deficient. PKU is autosomal recessive, meaning that both copies of the gene must be mutated for the condition to develop. There are two main types, classic PKU and variant PKU, depending on if any enzyme function remains. Those with one copy of a mutated PAH gene typically do not have symptoms.

[0011] PAH is an enzyme that is normally expressed in the liver and is necessary to metabolize dietary phenylalanine (phe) into tyrosine, an amino acid responsible for the production of neurotransmitters. PAH catalyzes the hydroxylation of phenylalanine to tyrosine. Defective PAH enzyme results in the buildup of dietary phenylalanine to potentially toxic levels.

[0012] PKU can be caused by a single-gene defect in the enzyme phenylalanine hydroxylase (PAH), which results in elevated serum phe levels. PAH converts phe to tyrosine in vertebrates. In the absence of PAH, the only other mechanisms to remove Phe are protein synthesis and a minor degradative path involving the deamination and oxidative decarboxylation of the alanine side chain, which yields the characteristic phenyllactate and phenylacetate seen in urine of PKU patients. Unfortunately, a typical diet contains more Phe than can be eliminated in the absence of PAH. The resulting accumulation of Phe in PKU patients leads to a number of symptoms including abnormal brain development and severe mental retardation. (Kaufman, Proc Nat'l Acad Sci USA 96: 3160-3164, 1999).

[0013] The current standard of care is a highly restrictive diet (restriction of phenylalanine (Phe)), but it is not always effective, as such dietary restriction is difficult to maintain and does not correct the underlying defect. Current therapy for PKU is with a diet low in foods that contain phenylalanine and special supplements. The strict diet must begin as soon as possible after birth and be continued for at least 10 years, if not for the duration of life. If left untreated, PKU can result in progressive and severe neurological impairment. There are approximately 16,500 people living in the United States with PKU, and to date there are no treatments available that address the genetic defect in PKU.

[0014] Despite the tremendous advances in understanding the biochemistry, molecular biology, and genetics of PKU, little progress has been made in developing new treatments for the disorder. There is large unmet need for disease-modifying therapies in PKU. First, current therapies are not disease modifying and are only effective in a subset of patients, and still require strict dietary restrictions, and non-compliance can lead to neuronal damage. Second, there are no approved gene therapies for PKU, and AAV based therapies cannot be used by 25% to 40% of patients due to pre-existing antibodies. Further, AAV can only be administered once, and the resulting PAH levels might not be high enough to be efficacious, or may be supranormal, dose levels cannot be titrated.

[0015] Accordingly, there is need in the field for a technology that permits expression of a therapeutic PAH protein in a cell, tissue or subject for the treatment of PKU.

### BRIEF DESCRIPTION

[0016] The technology described herein relates to methods and compositions for treatment of Phenylketonuria (PKU) by expression of enzyme phenylalanine hydroxylase (PAH) from a capsid-free (e.g., non-viral) DNA vector with covalently-closed ends (referred to herein as a “closed-ended DNA vector” or a “ceDNA vector”), where the ceDNA vector comprises a PAH nucleic acid sequence that has been codon optimized and combined with particular cis-elements (e.g., specific promoters, specific enhancers and specific promoter and enhancer combinations), and that have been tested for optimal correction of phenylalanine level (e.g., expression and duration) in a mouse model of PKU. According to some embodiments, particular codon optimized PAH nucleic acid sequences perform better when combined with a specific promoter sequence and/or a specific enhancer sequence, compared to the same codon optimized PAH nucleic acid sequence combined with another promoter sequence and/or a specific enhancer sequence. As described by the present disclosure, the constructs comprising codon optimized sequences performed considerably better than native hPAH cDNA sequence, and certain constructs comprising codon optimized sequences and particular cis-acting elements showed extended correction through the duration of 28 days of the study, demonstrating durability of expression and efficacy. Surprisingly, it was found that constructs comprising certain promoters (e.g., hAAT CpG minimized promoter) performed better with certain open reading frames (ORFs) (ceDNA412 codop 2 ORF) in vivo in the PAH^{enu2} mouse model, while hAAT promoter was generally outcompeted by VD Promoter (VD) or 3×VD in vitro or with other ORFs (e.g., luciferase).

[0017] These ceDNA vectors can be used to produce PAH proteins for treatment, monitoring, and diagnosis. The application of ceDNA vectors expressing PAH to a subject for the treatment of PKU is useful to: (i) provide disease modifying levels of PAH enzyme, (ii) be minimally invasive in delivery, (iii) be repeatable and dosed-to-effect, (iv) have rapid onset of therapeutic effect, (v) result in sustained expression of corrective PAH enzyme in the liver, (vi) restoring urea cycle function, phenylalanine metabolism, and/or (vii) be titratable to achieve the appropriate pharmacologic levels of the defective enzyme.

[0018] Accordingly, the disclosure described herein relates to a capsid-free (e.g., non-viral) DNA vector with covalently-closed ends (referred to herein as a “closed-ended DNA vector” or a “ceDNA vector”) comprising a PAH nucleic acid sequence that has been codon optimized and combined with particular cis-acting elements (e.g., specific promoters, specific enhancers and specific promoter and enhancer combinations), to permit expression of the PAH therapeutic protein in a cell.

[0019] In one aspect, disclosed herein is a closed-ended DNA (ceDNA) vector comprising at least one nucleic acid sequence that encodes at least one PAH protein, wherein the at least one nucleic acid sequence is selected from a sequence having at least 90% identity to any of the sequences listed in Table 1A, wherein the at least one nucleic acid sequence is codon optimized, and wherein the at least one nucleic acid sequence is located between flanking inverted terminal repeats (ITRs); a promoter operatively linked to the least one nucleic acid sequence that encodes the at least one PAH protein, wherein the promoter is selected from the group consisting of the VD promoter, the human alpha 1-antitrypsin (hAAT) promoter (including a sequence having at least 96%, 97%, 98%, 99% or 100% identity to the hAAT(979) promoter (hAAT_core_C10) or other CpG minimized (CpGmin)_hAAT promoters like hAAT_core_C06; hAAT_core_C07; hAAT_core_C08; and hAAT_core_C09) and the transthyretin (TTR) liver specific promoter.

[0020] In one embodiment, the at least one nucleic acid sequence encoding the at least one PAH protein is selected from a sequence having at least 95% identity to any one of the sequences set forth in Table 1A. In one embodiment, the at least one nucleic acid sequence encoding the at least one PAH protein is selected from a sequence having at least 96% identity to any one of the sequences set forth in Table 1A. In one embodiment, the at least one nucleic acid sequence encoding the at least one PAH protein is selected from a sequence having at least 97% identity to any one of the sequences set forth in Table 1A. In one embodiment, the at least one nucleic acid sequence encoding the at least one PAH protein is selected from a sequence having at least 98% identity to any one of the sequences set forth in Table 1A. In one embodiment, the at least one nucleic acid sequence encoding the at least one PAH protein is selected from a sequence having at least 99% identity to any one of the sequences set forth in Table 1A. In one embodiment, the at least one nucleic acid sequence encoding the at least one PAH protein is selected from a sequence comprising any one of the sequences set forth in Table 1A.

[0021] According to another aspect, the disclosure provides a closed-ended DNA (ceDNA) vector comprising a nucleic acid sequence that encodes at least one PAH protein, wherein the nucleic acid sequence is selected from a sequence having at least 95% identity to any of the sequences listed in Table 1A, wherein the at least one nucleic acid sequence is located between flanking inverted terminal repeats (ITRs); and a promoter operatively linked to the nucleic acid sequence that encodes the at least one PAH protein, wherein the promoter is selected from the group consisting of the VD promoter, the human alpha 1-antitrypsin (hAAT) promoter and the transthyretin (TTR) liver specific promoter.

[0022] According to another aspect, the disclosure provides a closed-ended DNA (ceDNA) vector comprising a nucleic acid sequence that encodes at least one PAH protein, wherein the nucleic acid sequence is selected from a sequence having at least 96% identity to any of the sequences listed in Table 1A, wherein the at least one nucleic acid sequence is located between flanking inverted terminal repeats (ITRs); and a promoter operatively linked to the nucleic acid sequence that encodes the at least one PAH protein, wherein the promoter is selected from the group consisting of the VD promoter, the human alpha 1-antitrypsin (hAAT) promoter and the transthyretin (TTR) liver specific promoter.

[0023] According to another aspect, the disclosure provides a closed-ended DNA (ceDNA) vector comprising a nucleic acid sequence that encodes at least one PAH protein, wherein the nucleic acid sequence is selected from a sequence having at least 97% identity to any of the sequences listed in Table 1A, wherein the at least one nucleic acid sequence is located between flanking inverted terminal repeats (ITRs); and a promoter operatively linked to the nucleic acid sequence that encodes the at least one PAH protein, wherein the promoter is selected from the group consisting of the VD promoter, the human alpha 1-antitrypsin (hAAT) promoter and the transthyretin (TTR) liver specific promoter.

[0024] According to another aspect, the disclosure provides a closed-ended DNA (ceDNA) vector comprising a nucleic acid sequence that encodes at least one PAH protein, wherein the nucleic acid sequence is selected from a sequence having at least 98% identity to any of the sequences listed in Table 1A, wherein the at least one nucleic acid sequence is located between flanking inverted terminal repeats (ITRs); and a promoter operatively linked to the nucleic acid sequence that encodes the at least one PAH protein, wherein the promoter is selected from the group consisting of the VD promoter, the human alpha 1-antitrypsin (hAAT) promoter and the transthyretin (TTR) liver specific promoter.

[0025] According to another aspect, the disclosure provides a closed-ended DNA (ceDNA) vector comprising a nucleic acid sequence that encodes at least one PAH protein, wherein the nucleic acid sequence is selected from a sequence having at least 99% identity to any of the sequences listed in Table 1A, wherein the at least one nucleic acid sequence is located between flanking inverted terminal repeats (ITRs); and a promoter operatively linked to the nucleic acid sequence that encodes the at least one PAH protein, wherein the promoter is selected from the group consisting of the VD promoter, the human alpha 1-antitrypsin (hAAT) promoter and the transthyretin (TTR) liver specific promoter.

[0026] In one embodiment, the at least one nucleic acid sequence encoding the at least one PAH protein is a sequence having at least 98% identity to the sequence set forth as SEQ ID NO:382. In one embodiment, the at least one nucleic acid sequence encoding the at least one PAH protein is a sequence having at least 99% identity to the sequence set forth as SEQ ID NO:382. In one embodiment, the at least one nucleic acid sequence encoding the at least one PAH protein comprises SEQ ID NO:382 or consists of SEQ ID NO:382.

[0027] In one embodiment, the at least one nucleic acid sequence encoding the at least one PAH protein is a sequence having at least 99% identity to the sequence set forth as SEQ ID NO:425. In one embodiment, the at least one nucleic acid sequence encoding the at least one PAH protein is set forth as SEQ ID NO:425. In one embodiment, the at least one nucleic acid sequence encoding the at least one PAH protein is a sequence having at least 99% identity to the sequence set forth as SEQ ID NO:431. In one embodiment, the at least one nucleic acid sequence encoding the at least one PAH protein is set forth as SEQ ID NO:431. In one embodiment, the at least one nucleic acid sequence encoding the at least one PAH protein is a sequence having at least 99% identity to the sequence set forth as SEQ ID NO:435. In one embodiment, the at least one nucleic acid sequence encoding the at least one PAH protein is set forth as SEQ ID NO:435.

[0028] In one embodiment, the promoter comprises a sequence that is at least 85%, 90%, 95%, 96%, 97%, 98%, or 99% identical to, comprises, or consists of any one of SEQ ID NOs:441-448 and/or a sequence set forth in Table 7A.

[0029] In one embodiment, the promoter comprises a nucleic acid sequence having at least 85% identity, at least 90% identity, at least 95% identity, at least 96% identity, at least 97% identity, at least 98% identity, at least 99% identity or comprises SEQ ID NO: 191.

[0030] In one embodiment of the aspects and embodiments herein, the promoter comprises a nucleic acid sequence having at least 98% identity to SEQ ID NO: 443. In one embodiment of the aspects and embodiments herein, the promoter comprises a nucleic acid sequence having at least 99% identity to SEQ ID NO: 444. In one embodiment of the aspects and embodiments herein, the promoter comprises a nucleic acid sequence having at least 99% identity to SEQ ID NO: 445. In one embodiment of the aspects and embodiments herein, the promoter comprises a nucleic acid sequence having at least 99% identity to SEQ ID NO: 446. In one embodiment of the aspects and embodiments herein, the promoter comprises a nucleic acid sequence having at least 96% identity to SEQ ID NO: 447. In one embodiment of the aspects and embodiments herein, the promoter is a promoter set that comprises a nucleic acid sequence having at least 85% identity to SEQ ID NO: 462. In one embodiment of the aspects and embodiments herein, the promoter is a promoter set that comprises a nucleic acid sequence having at least 85% identity to SEQ ID NO: 467. In one embodiment of the aspects and embodiments herein, the promoter is a promoter set that comprises a nucleic acid sequence having at least 85% identity to SEQ ID NO: 470. In one embodiment of the aspects and embodiments herein, the promoter is a promoter set that comprises a nucleic acid sequence having at least 90% identity to SEQ ID NO: 470. In one embodiment of the aspects and embodiments herein, the promoter is a promoter set that comprises a nucleic acid sequence having at least 95% identity to SEQ ID NO: 470.

[0031] In one embodiment, the ceDNA vector further comprises an enhancer. In one embodiment, the enhancer comprises a sequence that is at least 85%, 90%, 95%, 96%, 97%, 98%, or 99% identical to, comprises, or consists of any one of SEQ ID NOs:449-461 and/or a sequence set forth in Table 8A. In one embodiment, the enhancer is selected from the group consisting of a serpin enhancer, a 3×HNF1-4_ProEnh_10mer, and a 5×HNF1_ProEnh_10mer. In one embodiment, the enhancer comprises a nucleic acid sequence having at least 85% identity to SEQ ID NO: 450. In one embodiments, the enhancer comprises a nucleic acid sequence having at least 85% identity to SEQ ID NO: 586. In one embodiment, the enhancer comprises a nucleic acid sequence having at least 85% identity to SEQ ID NO: 587.

[0032] In one embodiment, the ceDNA vector further comprises one or more introns. In one embodiment, the one or more introns comprises a sequence that is at least 85%, 90%, 95%, 96%, 97%, 98%, or 99% identical to, comprises, or consists of any one of SEQ ID NOs:509-516 and 1000 and/or a sequence set forth in Table 11A. In one embodiment, the one or more introns is the minute virus of mice (MVM).

[0033] In one embodiment, the ceDNA vector comprises a 3′ untranslated region (3′ UTR). In one embodiment, the 3′ UTR comprises a sequence that is at least 85%, 90%, 95%, 96%, 97%, 98%, or 99% identical to, comprises, or consists of any one of SEQ ID NOs:517-525 and/or a sequence set forth in Table 12.

[0034] In one embodiment, the ceDNA vector comprises a 5′ untranslated region (5′ UTR). In one embodiment, the 5′ UTR comprises a sequence that is at least 85%, 90%, 95%, 96%, 97%, 98%, or 99% identical to, comprises, or consists of any one of SEQ ID NOs:482-508 and/or a sequence set forth in Table 10.

[0035] In one embodiment, the ceDNA vector comprises at least one polyA sequence.

[0036] In one embodiment, the VD promoter comprises a SERP enhancer. In one embodiment, the VD promoter comprises a 3×SERP enhancer.

[0037] In one embodiment, the promoter is the TTR liver promoter and the ceDNA further comprises an MVM intron.

[0038] In one embodiment, the ceDNA vector comprises a nucleic acid sequence that is at least 90%, at least 95%, at least 96%, at least 97%, at least 98%, or at least 99% identical to, comprises, or consists of a nucleic acid sequence selected from the group consisting of: SEQ ID NO: 194, SEQ ID NO: 195, SEQ ID NO: 196, SEQ ID NO: 197, SEQ ID NO: 198, SEQ ID NO: 199, SEQ ID NO: 200, SEQ ID NO: 201, SEQ ID NO: 202, SEQ ID NO: 203, SEQ ID NO: 204, SEQ ID NO: 205, SEQ ID NO: 206, SEQ ID NO: 207, SEQ ID NO: 208, SEQ ID NO: 209, SEQ ID NO: 210, SEQ ID NO: 211, SEQ ID NO: 212, SEQ ID NO: 213, SEQ ID NO: 541, SEQ ID NO: 542, SEQ ID NO: 543, SEQ ID NO: 544, SEQ ID NO: 545, SEQ ID NO: 546, SEQ ID NO: 547, SEQ ID NO: 548, SEQ ID NO: 549, SEQ ID NO: 550, SEQ ID NO: 551, SEQ ID NO: 552, SEQ ID NO: 553, SEQ ID NO: 554, SEQ ID NO: 555, SEQ ID NO: 556, SEQ ID NO: 557, SEQ ID NO: 558, SEQ ID NO: 559, SEQ ID NO: 560, SEQ ID NO: 561, SEQ ID NO: 562, SEQ ID NO: 563, SEQ ID NO: 564, SEQ ID NO: 565, SEQ ID NO: 566, SEQ ID NO: 567, SEQ ID NO: 570, SEQ ID NO: 571, SEQ ID NO: 572, SEQ ID NO: 573, SEQ ID NO: 574, SEQ ID NO: 575, SEQ ID NO: 576, SEQ ID NO: 577, SEQ ID NO: 578, SEQ ID NO: 579, SEQ ID NO: 580, SEQ ID NO: 581, SEQ ID NO: 582, SEQ ID NO: 583, and SEQ ID NO: 584.

[0039] In one embodiment, the at least one nucleic acid sequence is cDNA for PAH.

[0040] In one embodiment, at least one ITR comprises a functional terminal resolution site (TRS) and a Rep binding site. In one embodiment, one or both of the ITRs are from a virus selected from a parvovirus, a dependovirus, and an adeno-associated virus (AAV). In one embodiment, the flanking ITRs are symmetric or asymmetric. In one embodiment, the flanking ITRs are symmetrical or substantially symmetrical. In one embodiment, the flanking ITRs are asymmetric. In one embodiment, one or both of the ITRs are wild type, or wherein both of the ITRs are wild-type. In one embodiment, the flanking ITRs are from different viral serotypes. In one embodiment, the flanking ITRs are from a pair of viral serotypes shown in Table 2. In one embodiment, one or both of the ITRs comprises a sequence selected from the sequences in Table 3, Table 5A, Table 5B, or Table 6.

[0041] In one embodiment, at least one of the ITRs is altered from a wild-type AAV ITR sequence by a deletion, addition, or substitution that affects the overall three-dimensional conformation of the ITR. In one embodiment, one or both of the ITRs are derived from an AAV serotype selected from AAV1, AAV2, AAV3, AAV4, AAV5, AAV6, AAV7, AAV8, AAV9, AAV10, AAV11, and AAV12.

[0042] In one embodiment, one or both of the ITRs are synthetic. In one embodiment, one or both of the ITRs is not a wild type ITR, or wherein both of the ITRs are not wild-type.

[0043] In one embodiment, one or both of the ITRs is modified by a deletion, insertion, and/or substitution in at least one of the ITR regions selected from A, A′, B, B′, C, C′, D, and D′. In one embodiment, the deletion, insertion, and/or substitution results in the deletion of all or part of a stem-loop structure normally formed by the A, A′, B, B′ C, or C′ regions.

[0044] In one embodiment, one or both of the ITRs are modified by a deletion, insertion, and/or substitution that results in the deletion of all or part of a stem-loop structure normally formed by the B and B′ regions. In one embodiment, one or both of the ITRs are modified by a deletion, insertion, and/or substitution that results in the deletion of all or part of a stem-loop structure normally formed by the C and C′ regions. In one embodiment, one or both of the ITRs are modified by a deletion, insertion, and/or substitution that results in the deletion of part of a stem-loop structure normally formed by the B and B′ regions and/or part of a stem-loop structure normally formed by the C and C′ regions. In one embodiment, one or both of the ITRs comprise a single stem-loop structure in the region that normally comprises a first stem-loop structure formed by the B and B′ regions and a second stem-loop structure formed by the C and C′ regions. In one embodiment, one or both of the ITRs comprise a single stem and two loops in the region that normally comprises a first stem-loop structure formed by the B and B′ regions and a second stem-loop structure formed by the C and C′ regions.

[0045] In one embodiment, one or both of the ITRs comprise a single stem and a single loop in the region that normally comprises a first stem-loop structure formed by the B and B′ regions and a second stem-loop structure formed by the C and C′ regions.

[0046] In one embodiment, both ITRs are altered in a manner that results in an overall three-dimensional symmetry when the ITRs are inverted relative to each other.

[0047] In one embodiment, the ceDNA vector comprises a nucleic acid sequence that is at least 90% identical to SEQ ID NOs: 382-440 or SEQ ID NOs: 1011-1015. In one embodiment, the ceDNA vector comprises a nucleic acid sequence that is at least 95% identical to SEQ ID NOs: 382-440, or SEQ ID NOs: 1011-1015. In one embodiment, the ceDNA vector comprises a nucleic acid sequence that is at least 96% identical to SEQ ID NOs: 382-440 or SEQ ID NOs: 1011-1015. In one embodiment, the ceDNA vector comprises a nucleic acid sequence that is at least 97% identical to SEQ ID NOs: 382-440 or SEQ ID NOs: 1011-1015. In one embodiment, the ceDNA vector comprises a nucleic acid sequence that is at least 98% identical to SEQ ID NOs: 382-440 or SEQ ID NOs: 1011-1015. In one embodiment, the ceDNA vector comprises a nucleic acid sequence that is at least 99% identical to SEQ ID NOs: 382-440 or SEQ ID NOs: 1011-1015.

[0048] In another aspect, disclosed herein is a method of expressing a PAH protein in a cell, the method comprising contacting the cell with a ceDNA vector disclosed herein. In one embodiment, the cell is a photoreceptor or a RPE cell. In one embodiment, the cell is contacted in vitro or in vivo.

[0049] In another aspect, disclosed herein is a method of treating a subject with phenylketonuria (PKU), the method comprising administering to the subject a ceDNA vector disclosed herein. In one embodiment, the at least one nucleic acid sequence that encodes at least one PAH protein is selected from a sequence having at least 90% identity with any of the sequences set forth in Table 1A. In one embodiment, the subject exhibits at least about a 50% decrease in level of serum phenylalanine as compared to a level of serum phenylalanine in the subject prior to administration. In one embodiment, the subject exhibits at least about a 10% increase in PAH activity after administration as compared to a level of PAH activity prior to administration.

[0050] In one embodiment, the ceDNA vector is formulated in lipid nanoparticles. In one embodiment, the ceDNA vector is administered intravenously. In one embodiment, the ceDNA vector is adminstered intramuscularly. In one embodiment, the ceDNA vector is administered by infusion.

[0051] In another aspect, disclosed herein is a pharmaceutical composition comprising a ceDNA vector.

[0052] In another aspect, disclosed herein is a composition comprising a ceDNA vector and a lipid. In one embodiment, the lipid is a lipid nanoparticle (LNP).

[0053] In another aspect, disclosed herein is a kit comprising a ceDNA vector disclosed herein, a pharmaceutical composition disclosed herein, or a composition disclosed herein. In one embodiment, the kit comprises instructions for use.

[0054] These and other aspects of the disclosure are described in further detail below.

### DESCRIPTION OF DRAWINGS

[0055] The patent or application file contains at least one drawing executed in color. Copies of this patent or patent application publication with color drawing(s) will be provided by the Office upon request and payment of the necessary fee.

[0056] Embodiments of the present disclosure, briefly summarized above and discussed in greater detail below, can be understood by reference to the illustrative embodiments of the disclosure depicted in the appended drawings. However, the appended drawings illustrate only typical embodiments of the disclosure and are therefore not to be considered limiting of scope, for the disclosure may admit to other equally effective embodiments.

[0057] FIG. 1A provides the T-shaped stem-loop structure of a wild-type left ITR of AAV2 (SEQ ID NO: 52) with identification of A-A′ arm, B-B′ arm, C-C′ arm, two Rep binding sites (RBE and RBE′) and also shows the terminal resolution site (TRS). The RBE contains a series of 4 duplex tetramers that are believed to interact with either Rep 78 or Rep 68. In addition, the RBE′ is also believed to interact with Rep complex assembled on the wild-type ITR or mutated ITR in the construct. The D and D′ regions contain transcription factor binding sites and other conserved structure. FIG. 1B shows proposed Rep-catalyzed nicking and ligating activities in a wild-type left ITR (SEQ ID NO: 53), including the T-shaped stem-loop structure of the wild-type left ITR of AAV2 with identification of A-A′ arm, B-B′ arm, C-C′ arm, two Rep Binding sites (RBE and RBE′) and also shows the terminal resolution site (TRS), and the D and D′ region comprising several transcription factor binding sites and other conserved structure.

[0058] FIG. 2A provides the primary structure (polynucleic acid sequence) (left) and the secondary structure (right) of the RBE-containing portions of the A-A′ arm, and the C-C′ and B-B′ arm of the wild type left AAV2 ITR (SEQ ID NO: 54). FIG. 2B shows an exemplary mutated ITR (also referred to as a modified ITR) sequence for the left ITR. Shown is the primary structure (left) and the predicted secondary structure (right) of the RBE portion of the A-A′ arm, the C arm and B-B′ arm of an exemplary mutated left ITR (ITR-1, left) (SEQ ID NO: 113). FIG. 2C shows the primary structure (left) and the secondary structure (right) of the RBE-containing portion of the A-A′ loop, and the B-B′ and C-C′ arms of wild type right AAV2 ITR (SEQ ID NO: 55). FIG. 2D shows an exemplary right modified ITR. Shown is the primary structure (left) and the predicted secondary structure (right) of the RBE containing portion of the A-A′ arm, the B-B′ and the C arm of an exemplary mutant right ITR (ITR-1, right) (SEQ ID NO: 114). Any combination of left and right ITR (e.g., AAV2 ITRs or other viral serotype or synthetic ITRs) can be used as taught herein. Each of FIGS. 2A-2D polynucleotide sequences refer to the sequence used in the plasmid or bacmid/baculovirus genome used to produce the ceDNA as described herein. Also included in each of FIGS. 2A-2D are corresponding ceDNA secondary structures inferred from the ceDNA vector configurations in the plasmid or bacmid/baculovirus genome and the predicted Gibbs free energy values.

[0059] FIG. 3A is a schematic illustrating an upstream process for making baculovirus infected insect cells (BIICs) that are useful in the production of a ceDNA vector for expression of the PAH as disclosed herein in the process described in the schematic in FIG. 3B. FIG. 3B is a schematic of an exemplary method of ceDNA production and FIG. 3C illustrates a biochemical method and process to confirm ceDNA vector production. FIG. 3D and FIG. 3E are schematic illustrations describing a process for identifying the presence of ceDNA in DNA harvested from cell pellets obtained during the ceDNA production processes in FIG. 3B. FIG. 3D shows schematic expected bands for an exemplary ceDNA either left uncut or digested with a restriction endonuclease and then subjected to electrophoresis on either a native gel or a denaturing gel. The leftmost schematic is a native gel, and shows multiple bands suggesting that in its duplex and uncut form ceDNA exists in at least monomeric and dimeric states, visible as a faster-migrating smaller monomer and a slower-migrating dimer that is twice the size of the monomer. The schematic second from the left shows that when ceDNA is cut with a restriction endonuclease, the original bands are gone and faster-migrating (e.g., smaller) bands appear, corresponding to the expected fragment sizes remaining after the cleavage. Under denaturing conditions, the original duplex DNA is single-stranded and migrates as a species twice as large as observed on native gel because the complementary strands are covalently linked. Thus, in the second schematic from the right, the digested ceDNA shows a similar banding distribution to that observed on native gel, but the bands migrate as fragments twice the size of their native gel counterparts. The rightmost schematic shows that uncut ceDNA under denaturing conditions migrates as a single-stranded open circle, and thus the observed bands are twice the size of those observed under native conditions where the circle is not open. In this figure “kb” is used to indicate relative size of nucleotide molecules based, depending on context, on either nucleotide chain length (e.g., for the single stranded molecules observed in denaturing conditions) or number of basepairs (e.g., for the double-stranded molecules observed in native conditions). FIG. 3E shows DNA having a non-continuous structure. The ceDNA can be cut by a restriction endonuclease, having a single recognition site on the ceDNA vector, and generate two DNA fragments with different sizes (1 kb and 2 kb) in both neutral and denaturing conditions. FIG. 3E also shows a ceDNA having a linear and continuous structure. The ceDNA vector can be cut by the restriction endonuclease, and generate two DNA fragments that migrate as 1 kb and 2 kb in neutral conditions, but in denaturing conditions, the stands remain connected and produce single strands that migrate as 2 kb and 4 kb.

[0060] FIG. 4 is an exemplary picture of a denaturing gel running examples of ceDNA vectors with (+) or without (−) digestion with endonucleases (EcoRI for ceDNA construct 1 and 2; BamH1 for ceDNA construct 3 and 4; SpeI for ceDNA construct 5 and 6; and XhoI for ceDNA construct 7 and 8) Constructs 1-8 are described in Example 1 of International Patent Application No. PCT/US18/49996, which is incorporated herein in its entirety by reference. Sizes of bands highlighted with an asterisk were determined and provided on the bottom of the picture.

[0061] FIGS. 5A-5E are graphs depicting the results of the experiment described in Example 6. The effect of ceDNA vector comprising a PAH nucleic acid sequence that has been codon optimized (ceDNA412; hPAH_codop_ORF_v2) or a ceDNA vector comprising a PAH nucleic acid sequence that has been codon optimized (ceDNA1530; hPAH-r5-s29) with a 3×HS-CRM8_SERP_Enhancer, a TTR-promoter-d5pUTR and MVM_intron on correction of phenylalanine concentration (“PHE μM”) was assessed in individual mice at both a 0.5 μg and 5 μg hydrodynamic dose, over 21 days.

[0062] FIGS. 6A-6B are graphs depicting the results of the experiment described in Example 7. The effect of ceDNA vectors comprising a PAH nucleic acid sequence that has been codon optimized (ceDNA412, ceDNA1132, ceDNA1274 and ceDNA1527) on correction of phenylalanine concentration (“PHE μM”) was assessed in individual mice at both a 0.5 μg and 5 μg hydrodynamic dose, and the mean correction for all five mice in each group are shown in the graphs of FIGS. 6A-6B. PHE concentration did not decrease in the control animal (PAH^{enu2}: vehicle).

[0063] FIGS. 7A-7G are graphs depicting the results of the experiment described in Example 7 for individual mice.

[0064] FIGS. 8A-8B are graphs depicting the results of the experiment described in Example 8. The effect of ceDNA vectors comprising a PAH nucleic acid sequence that has been codon optimized (ceDNA1416, ceDNA1428, and ceDNA1528, ceDNA1414) on correction of phenylalanine concentration (“PHE μM”) was assessed in individual mice at both a 0.5 μg and 5 μg hydrodynamic dose, after 7 days, and the mean correction for all five mice in each group are shown in the graphs of FIGS. 8A-8B. PHE concentration did not decrease in the control animal (PAHenu2: vehicle).

[0065] FIGS. 9A-9E are graphs depicting the results of the experiment described in Example 8. The effect of ceDNA vectors comprising a PAH nucleic acid sequence that has been codon optimized (ceDNA1416, ceDNA1428, ceDNA1414 and ceDNA1528) on correction of phenylalanine concentration (“PHE μM”) was assessed in individual mice at a 0.5 μg hydrodynamic dose, after 7 days.

[0066] FIGS. 10A-10E are graphs depicting the results of the experiment described in Example 8. The effect of ceDNA vectors comprising a PAH nucleic acid sequence that has been codon optimized (ceDNA1416, ceDNA1428, ceDNA1414 and ceDNA1528) on correction of phenylalanine concentration (“PHE μM”) was assessed in individual mice at a 5 μg hydrodynamic dose, after 7 days.

[0067] FIGS. 11A-11B are graphs depicting the results of the experiment described in Example 8. The effect of ceDNA vectors comprising a PAH nucleic acid sequence that has been codon optimized (ceDNA1416, ceDNA1428, ceDNA1414 and ceDNA1528) on correction of phenylalanine concentration (“PHE μM”) was assessed in individual mice at both a 0.5 μg and 5 μg hydrodynamic dose, after 28 days, and the mean correction for all five mice in each group are shown in the graphs of FIGS. 11A-11B. PHE concentration did not decrease in the control animal (PAH^{enu2}: vehicle).

[0068] FIGS. 12A-12E are graphs depicting the results of the experiment described in Example 8. The effect of ceDNA vectors comprising a PAH nucleic acid sequence that has been codon optimized (ceDNA1416, ceDNA1428, ceDNA1414 and ceDNA1528) on correction of phenylalanine concentration (“PHE μM”) was assessed in individual mice at a 0.5 μg hydrodynamic dose, after 28 days.

[0069] FIGS. 13A-13E are graphs depicting the results of the experiment described in Example 8. The effect of ceDNA vectors comprising a PAH nucleic acid sequence that has been codon optimized (ceDNA1416, ceDNA1428, ceDNA1414 and ceDNA1528) on correction of phenylalanine concentration (“PHE μM”) was assessed in individual mice at a 5 μg hydrodynamic dose, after 28 days.

[0070] FIGS. 14A-14I are graphs depicting the results of the experiment described in Example 8. The effect of ceDNA vectors comprising a PAH nucleic acid sequence that has been codon optimized (ceDNA412, ceDNA1430, ceDNA1432, ceDNA1473, ceDNA1474, ceDNA1436, ceDNA1471, ceDNA1472) on correction of phenylalanine concentration (“PHE μM”) was assessed in individual mice at a 5 μg hydrodynamic dose, after 7 days.

[0071] FIGS. 15A-15I are graphs depicting the results of the experiment described in Example 9. The effect of ceDNA vectors comprising a PAH nucleic acid sequence that has been codon optimized (ceDNA412, ceDNA1476, ceDNA1479, ceDNA1939, ceDNA1940, ceDNA1941, ceDNA1942, ceDNA1943, ceDNA1944) on correction of serum phenylalanine levels (“PHE μM”) was assessed in individual mice at a 0.5 μg hydrodynamic dose, after 28 days.

[0072] FIGS. 16A-16D are graphs depicting the results of the experiment described in Example 10. The effect of ceDNA vectors comprising a PAH nucleic acid sequence that has been codon optimized (ceDNA412, ceDNA1939, ceDNA1955, ceDNA62) on correction of serum phenylalanine levels (“PHE μM”) was assessed in individual mice at a 0.5 μg hydrodynamic dose, after 28 days.

[0073] FIGS. 17A-17H are graphs depicting the results of the experiment described in Example 11. The effect of ceDNA vectors comprising a PAH nucleic acid sequence that has been codon optimized (ceDNA412, ceDNA2409, ceDNA2410, ceDNA2415, ceDNA2418, ceDNA2416, ceDNA2419, ceDNA2420) on correction of serum phenylalanine levels (“PHE μM”) was assessed in individual mice at a 0.5 μg hydrodynamic dose, after 28 days.

[0074] FIGS. 18A-18D are graphs depicting the results of the experiment described in Example 11. The effect of ceDNA vectors comprising a PAH nucleic acid sequence that has been codon optimized (ceDNA2415, ceDNA2418) on correction of serum phenylalanine levels (“PHE μM”) was assessed in individual mice at a 0.1 μg hydrodynamic dose, after 28 days.

[0075] FIGS. 19A-19F are graphs depicting the results of the experiment described in Example 12. The effect of ceDNA vectors comprising a PAH nucleic acid sequence that has been codon optimized (ceDNA412, ceDNA34, ceDNA36, ceDNA41, ceDNA42, ceDNA43) on correction of serum phenylalanine levels (“PHE μM”) was assessed in individual mice at a 0.5 μg hydrodynamic dose, after 28 days.

[0076] FIGS. 20A and 20B are schematic diagrams for an exemplary insertion of introns into PAH CDS. Chimeric PAH intron with functional splice donor and acceptor sites was inserted at the native position of intron 1 of PAH CDS. Intron flanking regions (33 bp) derived from PAH cDNA sequence were substituted for codon optimized sequence in PAH CDS. Figure discloses SEQ ID NO: 1022

[0077] FIG. 21 is a schematic for an exemplary insertion of introns into PAH CDS. Chimeric PAH intron with functional splice donor and acceptor sites was inserted at the native position of intron 1 of PAH CDS. The sequence of the regions flanking intron splice sites were altered to better match consensus sequences. Figure discloses SEQ ID NOS: 1023 and 1024, respectively, in order of appearance.

### DETAILED DESCRIPTION

[0078] Provided herein is a method for treating phenylketonuria (PKU) using a ceDNA vector comprising one or more codon optimized nucleic acids that encode an PAH therapeutic protein or fragment thereof. Also provided herein are ceDNA vectors for expression of PAH protein as described herein comprising one or more codon optimized nucleic acids that encode for the PAH protein or fragment thereof. It is a surprising finding of the present disclosure that codon optimized nucleic acids that encode a PAH therapeutic protein or fragment thereof, when combined with particular cis-acting elements (e.g., specific promoters and/or regulatory elements), provide optimal correction of phenylalanine level (e.g., expression and duration) in a subject.

[0079] According to some embodiments, an optimal correction of phenylalanine level is a level that is therapeutically effective to treat a disease or disorder resulting from a deficiency in phenylalanine hydroxylase (PAH). As described by the present disclosure, the constructs comprising codon optimized sequences performed considerably better than native hPAH cDNA sequence, and certain constructs comprising codon optimized sequences and particular cis-acting elements showed extended expression and correction of phenylalanine levels. In some embodiments, the expression of PAH protein can comprise secretion of the therapeutic protein out of the cell in which it is expressed or alternatively in some embodiments, the expressed PAH protein can act or function (e.g., exert its effect) within the cell in which it is expressed. In some embodiments, the ceDNA vector expresses PAH protein in the liver, a muscle (e.g., skeletal muscle) of a subject, or other body part, which can act as a depot for PAH therapeutic protein production and secretion to many systemic compartments.

### I. Definitions

[0080] Unless otherwise defined herein, scientific and technical terms used in connection with the present application shall have the meanings that are commonly understood by those of ordinary skill in the art to which this disclosure belongs. It should be understood that this disclosure is not limited to the particular methodology, protocols, and reagents, etc., described herein and as such can vary. The terminology used herein is for the purpose of describing particular embodiments only, and is not intended to limit the scope of the present disclosure, which is defined solely by the claims. Definitions of common terms in immunology and molecular biology can be found in The Merck Manual of Diagnosis and Therapy, 19th Edition, published by Merck Sharp & Dohme Corp., 2011 (ISBN 978-0-911910-19-3); Robert S. Porter et al. (eds.), Fields Virology, 6^{th} Edition, published by Lippincott Williams & Wilkins, Philadelphia, PA, USA (2013), Knipe, D. M. and Howley, P. M. (ed.), The Encyclopedia of Molecular Cell Biology and Molecular Medicine, published by Blackwell Science Ltd., 1999-2012 (ISBN 9783527600908); and Robert A. Meyers (ed.), Molecular Biology and Biotechnology: a Comprehensive Desk Reference, published by VCH Publishers, Inc., 1995 (ISBN 1-56081-569-8); Immunology by Werner Luttmann, published by Elsevier, 2006; Janeway's Immunobiology, Kenneth Murphy, Allan Mowat, Casey Weaver (eds.), Taylor & Francis Limited, 2014 (ISBN 0815345305, 9780815345305); Lewin's Genes XI, published by Jones & Bartlett Publishers, 2014 (ISBN-1449659055); Michael Richard Green and Joseph Sambrook, Molecular Cloning: A Laboratory Manual, 4^{th} ed., Cold Spring Harbor Laboratory Press, Cold Spring Harbor, N.Y., USA (2012) (ISBN 1936113414); Davis et al., Basic Methods in Molecular Biology, Elsevier Science Publishing, Inc., New York, USA (2012) (ISBN 044460149X); Laboratory Methods in Enzymology: DNA, Jon Lorsch (ed.) Elsevier, 2013 (ISBN 0124199542); Current Protocols in Molecular Biology (CPMB), Frederick M. Ausubel (ed.), John Wiley and Sons, 2014 (ISBN047150338X, 9780471503385), Current Protocols in Protein Science (CPPS), John E. Coligan (ed.), John Wiley and Sons, Inc., 2005; and Current Protocols in Immunology (CPI) (John E. Coligan, ADA M Kruisbeek, David H Margulies, Ethan M Shevach, Warren Strobe, (eds.) John Wiley and Sons, Inc., 2003 (ISBN 0471142735, 9780471142737), the contents of which are all incorporated by reference herein in their entireties.

[0081] As used herein, the terms, “administration,” “administering” and variants thereof refers to introducing a composition or agent (e.g., a therapeutic nucleic acid or an immunosuppressant as described herein) into a subject and includes concurrent and sequential introduction of one or more compositions or agents. “Administration” can refer, e.g., to therapeutic, pharmacokinetic, diagnostic, research, placebo, and experimental methods. “Administration” also encompasses in vitro and ex vivo treatments. The introduction of a composition or agent into a subject is by any suitable route, including orally, pulmonarily, intranasally, parenterally (intravenously, intramuscularly, intraperitoneally, or subcutaneously), rectally, intralymphatically, intratumorally, or topically. The introduction of a composition or agent into a subject is by electroporation. Administration includes self-administration and the administration by another. Administration can be carried out by any suitable route. A suitable route of administration allows the composition or the agent to perform its intended function. For example, if a suitable route is intravenous, the composition is administered by introducing the composition or agent into a vein of the subject.

[0082] As used herein, the phrases “nucleic acid therapeutic”, “therapeutic nucleic acid” and “TNA” are used interchangeably and refer to any modality of therapeutic using nucleic acids as an active component of therapeutic agent to treat a disease or disorder. As used herein, these phrases refer to RNA-based therapeutics and DNA-based therapeutics. Non-limiting examples of RNA-based therapeutics include mRNA, antisense RNA and oligonucleotides, ribozymes, aptamers, interfering RNAs (RNAi), Dicer-substrate dsRNA, small hairpin RNA (shRNA), asymmetrical interfering RNA (aiRNA), guide RNA (gRNA), and microRNA (miRNA). Non-limiting examples of DNA-based therapeutics include minicircle DNA, minigene, viral DNA (e.g., Lentiviral or AAV genome) or non-viral synthetic DNA vectors, closed-ended linear duplex DNA (ceDNA/CELiD), plasmids, bacmids, doggybone (dbDNA™) DNA vectors, minimalistic immunological-defined gene expression (MIDGE)-vector, nonviral ministring DNA vector (linear-covalently closed DNA vector), or dumbbell-shaped DNA minimal vector (“dumbbell DNA”).

[0083] As used herein, an “effective amount” or “therapeutically effective amount” of a therapeutic agent, such as a PAH therapeutic protein or fragment thereof, is an amount sufficient to produce the desired effect, e.g., provide disease modifying levels of PAH enzyme, result in sustained expression of corrective PAH enzyme in the liver, restored urea cycle function, phenylalanine metabolism, and/or achieve the appropriate pharmacologic levels of the defective enzyme. Suitable assays for measuring expression of a target gene or target sequence include, e.g., examination of protein or RNA levels using techniques known to those of skill in the art such as dot blots, northern blots, in situ hybridization, ELISA, immunoprecipitation, enzyme function, as well as phenotypic assays known to those of skill in the art. However, dosage levels are based on a variety of factors, including the type of injury, the age, weight, sex, medical condition of the patient, the severity of the condition, the route of administration, and the particular active agent employed. Thus, the dosage regimen may vary widely, but can be determined routinely by a physician using standard methods. Additionally, the terms “therapeutic amount”, “therapeutically effective amounts” and “pharmaceutically effective amounts” include prophylactic or preventative amounts of the compositions of the described disclosure. In prophylactic or preventative applications of the described disclosure, pharmaceutical compositions or medicaments are administered to a patient susceptible to, or otherwise at risk of, a disease, disorder or condition in an amount sufficient to eliminate or reduce the risk, lessen the severity, or delay the onset of the disease, disorder or condition, including biochemical, histologic and/or behavioral symptoms of the disease, disorder or condition, its complications, and intermediate pathological phenotypes presenting during development of the disease, disorder or condition. It is generally preferred that a maximum dose be used, that is, the highest safe dose according to some medical judgment. According to some embodiments, the disease, disorder or condition is PKU. The terms “dose” and “dosage” are used interchangeably herein.

[0084] As used herein the term “therapeutic effect” refers to a consequence of treatment, the results of which are judged to be desirable and beneficial. A therapeutic effect can include, directly or indirectly, the arrest, reduction, or elimination of a disease manifestation. A therapeutic effect can also include, directly or indirectly, the arrest reduction or elimination of the progression of a disease manifestation.

[0085] For any therapeutic agent described herein therapeutically effective amount may be initially determined from preliminary in vitro studies and/or animal models. A therapeutically effective dose may also be determined from human data. The applied dose may be adjusted based on the relative bioavailability and potency of the administered compound. Adjusting the dose to achieve maximal efficacy based on the methods described above and other well-known methods is within the capabilities of the ordinarily skilled artisan. General principles for determining therapeutic effectiveness, which may be found in Chapter 1 of Goodman and Gilman's The Pharmacological Basis of Therapeutics, 10^{th} Edition, McGraw-Hill (New York) (2001), incorporated herein by reference, are summarized below.

[0086] Pharmacokinetic principles provide a basis for modifying a dosage regimen to obtain a desired degree of therapeutic efficacy with a minimum of unacceptable adverse effects. In situations where the drug's plasma concentration can be measured and related to therapeutic window, additional guidance for dosage modification can be obtained.

[0087] As used herein, the terms “heterologous nucleotide sequence” and “transgene” are used interchangeably and refer to a nucleic acid of interest (other than a nucleic acid encoding a capsid polypeptide) that is incorporated into and may be delivered and expressed by a ceDNA vector as disclosed herein. In one embodiment, the at least one nucleic acid sequence encoding the at least one PAH protein is a heterologous nucleic acid sequence.

[0088] As used herein, the terms “expression cassette” and “transcription cassette” are used interchangeably and refer to a linear stretch of nucleic acids that includes a transgene that is operably linked to one or more promoters or other regulatory sequences sufficient to direct transcription of the transgene, but which does not comprise capsid-encoding sequences, other vector sequences or inverted terminal repeat regions. An expression cassette may additionally comprise one or more cis-acting sequences (e.g., promoters, enhancers, or repressors), one or more introns, and one or more post-transcriptional regulatory elements.

[0089] The terms “polynucleotide” and “nucleic acid,” used interchangeably herein, refer to a polymeric form of nucleotides of any length, either ribonucleotides or deoxyribonucleotides. Thus, this term includes single, double, or multi-stranded DNA or RNA, genomic DNA, cDNA, DNA-RNA hybrids, or a polymer including purine and pyrimidine bases or other natural, chemically or biochemically modified, non-natural, or derivatized nucleotide bases. “Oligonucleotide” generally refers to polynucleotides of between about 5 and about 100 nucleotides of single- or double-stranded DNA. However, for the purposes of this disclosure, there is no upper limit to the length of an oligonucleotide. Oligonucleotides are also known as “oligomers” or “oligos” and may be isolated from genes, or chemically synthesized by methods known in the art. The terms “polynucleotide” and “nucleic acid” should be understood to include, as applicable to the embodiments being described, single-stranded (such as sense or antisense) and double-stranded polynucleotides. DNA may be in the form of, e.g., antisense molecules, plasmid DNA, DNA-DNA duplexes, pre-condensed DNA, PCR products, vectors (P1, PAC, BAC, YAC, artificial chromosomes), expression cassettes, chimeric sequences, chromosomal DNA, or derivatives and combinations of these groups. DNA may be in the form of minicircle, plasmid, bacmid, minigene, ministring DNA (linear covalently closed DNA vector), closed-ended linear duplex DNA (CELiD or ceDNA), doggybone (dbDNA™) DNA, dumbbell shaped DNA, minimalistic immunological-defined gene expression (MIDGE)-vector, viral vector or nonviral vectors. RNA may be in the form of small interfering RNA (siRNA), Dicer-substrate dsRNA, small hairpin RNA (shRNA), asymmetrical interfering RNA (aiRNA), microRNA (miRNA), mRNA, gRNA, rRNA, tRNA, viral RNA (vRNA), and combinations thereof. Nucleic acids include nucleic acids containing known nucleotide analogs or modified backbone residues or linkages, which are synthetic, naturally occurring, and non-naturally occurring, and which have similar binding properties as the reference nucleic acid. Examples of such analogs and/or modified residues include, without limitation, phosphorothioates, phosphorodiamidate morpholino oligomer (morpholino), phosphoramidates, methyl phosphonates, chiral-methyl phosphonates, 2′-O-methyl ribonucleotides, locked nucleic acid (LNA™), and peptide nucleic acids (PNAs). Unless specifically limited, the term encompasses nucleic acids containing known analogues of natural nucleotides that have similar binding properties as the reference nucleic acid. Unless otherwise indicated, a particular nucleic acid sequence also implicitly encompasses conservatively modified variants thereof (e.g., degenerate codon substitutions), alleles, orthologs, SNPs, and complementary sequences as well as the sequence explicitly indicated.

[0090] “Nucleotides” contain a sugar deoxyribose (DNA) or ribose (RNA), a base, and a phosphate group. Nucleotides are linked together through the phosphate groups.

[0091] “Bases” include purines and pyrimidines, which further include natural compounds adenine, thymine, guanine, cytosine, uracil, inosine, and natural analogs, and synthetic derivatives of purines and pyrimidines, which include, but are not limited to, modifications which place new reactive groups such as, but not limited to, amines, alcohols, thiols, carboxylates, and alkylhalides.

[0092] As used herein, the term “interfering RNA” or “RNAi” or “interfering RNA sequence” includes single-stranded RNA (e.g., mature miRNA, ssRNAi oligonucleotides, ssDNAi oligonucleotides), double-stranded RNA (i.e., duplex RNA such as siRNA, Dicer-substrate dsRNA, shRNA, aiRNA, or pre-miRNA), a DNA-RNA hybrid (see, e.g., International Patent Application Publication No. WO 2004/078941), or a DNA-DNA hybrid (see, e.g., PCT Publication No. WO 2004/104199) that is capable of reducing or inhibiting the expression of a target gene or sequence (e.g., by mediating the degradation or inhibiting the translation of mRNAs which are complementary to the interfering RNA sequence) when the interfering RNA is in the same cell as the target gene or sequence. Interfering RNA thus refers to the single-stranded RNA that is complementary to a target mRNA sequence or to the double-stranded RNA formed by two complementary strands or by a single, self-complementary strand. Interfering RNA may have substantial or complete identity to the target gene or sequence, or may comprise a region of mismatch (i.e., a mismatch motif). The sequence of the interfering RNA can correspond to the full-length target gene, or a subsequence thereof. Preferably, the interfering RNA molecules are chemically synthesized. The disclosures of each of the above patent documents are herein incorporated by reference in their entirety for all purposes.

[0093] Interfering RNA includes “small-interfering RNA” or “siRNA,” e.g., interfering RNA of about 15-60, 15-50, or 15-40 (duplex) nucleotides in length, more typically about 15-30, 15-25, or 19-25 (duplex) nucleotides in length, and is preferably about 20-24, 21-22, or 21-23 (duplex) nucleotides in length (e.g., each complementary sequence of the double-stranded siRNA is 15-60, 15-50, 15-40, 15-30, 15-25, or 19-25 nucleotides in length, preferably about 20-24, 21-22, or 21-23 nucleotides in length, and the double-stranded siRNA is about 15-60, 15-50, 15-40, 15-30, 15-25, or 19-25 base pairs in length, preferably about 18-22, 19-20, or 19-21 base pairs in length). siRNA duplexes may comprise 3′ overhangs of about 1 to about 4 nucleotides or about 2 to about 3 nucleotides and 5′ phosphate termini. Examples of siRNA include, without limitation, a double-stranded polynucleotide molecule assembled from two separate stranded molecules, wherein one strand is the sense strand and the other is the complementary antisense strand; a double-stranded polynucleotide molecule assembled from a single stranded molecule, where the sense and antisense regions are linked by a nucleic acid-based or non-nucleic acid-based linker; a double-stranded polynucleotide molecule with a hairpin secondary structure having self-complementary sense and antisense regions; and a circular single-stranded polynucleotide molecule with two or more loop structures and a stem having self-complementary sense and antisense regions, where the circular polynucleotide can be processed in vivo or in vitro to generate an active double-stranded siRNA molecule. As used herein, the term “siRNA” includes RNA-RNA duplexes as well as DNA-RNA hybrids (see, e.g., PCT Publication No. WO 2004/078941, incorporated by reference in its entirety herein).

[0094] The term “nucleic acid construct” as used herein refers to a nucleic acid molecule, either single- or double-stranded, which is isolated from a naturally occurring gene or which is modified to contain segments of nucleic acids in a manner that would not otherwise exist in nature or which is synthetic. The term nucleic acid construct is synonymous with the term “expression cassette” when the nucleic acid construct contains the control sequences required for expression of a coding sequence of the present disclosure. An “expression cassette” includes a DNA coding sequence operably linked to a promoter.

[0095] By “hybridizable” or “complementary” or “substantially complementary” it is meant that a nucleic acid (e.g., RNA) includes a sequence of nucleotides that enables it to non-covalently bind, i.e. form Watson-Crick base pairs and/or G/U base pairs, “anneal”, or “hybridize,” to another nucleic acid in a sequence-specific, antiparallel, manner (i.e., a nucleic acid specifically binds to a complementary nucleic acid) under the appropriate in vitro and/or in vivo conditions of temperature and solution ionic strength. As is known in the art, standard Watson-Crick base-pairing includes: adenine (A) pairing with thymidine (T), adenine (A) pairing with uracil (U), and guanine (G) pairing with cytosine (C). In addition, it is also known in the art that for hybridization between two RNA molecules (e.g., dsRNA), guanine (G) base pairs with uracil (U). For example, G/U base-pairing is partially responsible for the degeneracy (i.e., redundancy) of the genetic code in the context of tRNA anti-codon base-pairing with codons in mRNA. In the context of this disclosure, a guanine (G) of a protein-binding segment (dsRNA duplex) of a subject DNA-targeting RNA molecule is considered complementary to an uracil (U), and vice versa. As such, when a G/U base-pair can be made at a given nucleotide position a protein-binding segment (dsRNA duplex) of a subject DNA-targeting RNA molecule, the position is not considered to be non-complementary, but is instead considered to be complementary.

[0096] The terms “peptide,” “polypeptide,” and “protein” are used interchangeably herein, and refer to a polymeric form of amino acids of any length, which can include coded and non-coded amino acids, chemically or biochemically modified or derivatized amino acids, and polypeptides having modified peptide backbones.

[0097] A DNA sequence that “encodes” a particular PAH protein is a DNA nucleic acid sequence that is transcribed into the particular RNA and/or protein. A DNA polynucleotide may encode an RNA (mRNA) that is translated into protein, or a DNA polynucleotide may encode an RNA that is not translated into protein (e.g., tRNA, rRNA, or a DNA-targeting RNA; also called “non-coding” RNA or “ncRNA”).

[0098] As used herein, the term “fusion protein” as used herein refers to a polypeptide which comprises protein domains from at least two different proteins. For example, a fusion protein may comprise (i) PAH or fragment thereof and (ii) at least one non-GOI protein. Fusion proteins encompassed herein include, but are not limited to, an antibody, or Fc or antigen-binding fragment of an antibody fused to a PAH protein, e.g., an extracellular domain of a receptor, ligand, enzyme or peptide. The PAH protein or fragment thereof that is part of a fusion protein can be a monospecific antibody or a bispecific or multispecific antibody.

[0099] As used herein, the term “genomic safe harbor gene” or “safe harbor gene” refers to a gene or loci that a nucleic acid sequence can be inserted such that the sequence can integrate and function in a predictable manner (e.g., express a protein of interest) without significant negative consequences to endogenous gene activity, or the promotion of cancer. In some embodiments, a safe harbor gene is also a loci or gene where an inserted nucleic acid sequence can be expressed efficiently and at higher levels than a non-safe harbor site.

[0100] As used herein, the term “gene delivery” means a process by which foreign DNA is transferred to host cells for applications of gene therapy.

[0101] As used herein, the term “terminal repeat” or “TR” includes any viral terminal repeat or synthetic sequence that comprises at least one minimal required origin of replication and a region comprising a palindrome hairpin structure. A Rep-binding sequence (“RBS”) (also referred to as RBE (Rep-binding element)) and a terminal resolution site (“TRS”) together constitute a “minimal required origin of replication” and thus the TR comprises at least one RBS and at least one TRS. TRs that are the inverse complement of one another within a given stretch of polynucleotide sequence are typically each referred to as an “inverted terminal repeat” or “ITR”. In the context of a virus, ITRs mediate replication, virus packaging, integration and provirus rescue. As was unexpectedly found in the disclosure herein, TRs that are not inverse complements across their full length can still perform the traditional functions of ITRs, and thus the term ITR is used herein to refer to a TR in a ceDNA genome or ceDNA vector that is capable of mediating replication of ceDNA vector. It will be understood by one of ordinary skill in the art that in complex ceDNA vector configurations more than two ITRs or asymmetric ITR pairs may be present. The ITR can be an AAV ITR or a non-AAV ITR, or can be derived from an AAV ITR or a non-AAV ITR. For example, the ITR can be derived from the family Parvoviridae, which encompasses parvoviruses and dependoviruses (e.g., canine parvovirus, bovine parvovirus, mouse parvovirus, porcine parvovirus, human parvovirus B-19), or the SV40 hairpin that serves as the origin of SV40 replication can be used as an ITR, which can further be modified by truncation, substitution, deletion, insertion and/or addition. Parvoviridae family viruses consist of two subfamilies: Parvovirinae, which infect vertebrates, and Densovirinae, which infect invertebrates. Dependoparvoviruses include the viral family of the adeno-associated viruses (AAV) which are capable of replication in vertebrate hosts including, but not limited to, human, primate, bovine, canine, equine and ovine species. For convenience herein, an ITR located 5′ to (upstream of) an expression cassette in a ceDNA vector is referred to as a “5′ ITR” or a “left ITR”, and an ITR located 3′ to (downstream of) an expression cassette in a ceDNA vector is referred to as a “3′ ITR” or a “right ITR”.

[0102] A “wild-type ITR” or “WT-ITR” refers to the sequence of a naturally occurring ITR sequence in an AAV or other Dependovirus that retains, e.g., Rep binding activity and Rep nicking ability. The nucleotide sequence of a WT-ITR from any AAV serotype may slightly vary from the canonical naturally occurring sequence due to degeneracy of the genetic code or drift, and therefore WT-ITR sequences encompassed for use herein include WT-ITR sequences as result of naturally occurring changes taking place during the production process (e.g., a replication error).

[0103] As used herein, the term “substantially symmetrical WT-ITRs” or a “substantially symmetrical WT-ITR pair” refers to a pair of WT-ITRs within a single ceDNA genome or ceDNA vector that are both wild type ITRs that have an inverse complement sequence across their entire length. For example, an ITR can be considered to be a wild-type sequence, even if it has one or more nucleotides that deviate from the canonical naturally occurring sequence, so long as the changes do not affect the properties and overall three-dimensional structure of the sequence. In some aspects, the deviating nucleotides represent conservative sequence changes. As one non-limiting example, a sequence that has at least 95%, 96%, 97%, 98%, or 99% sequence identity to the canonical sequence (as measured, e.g., using BLAST at default settings), and also has a symmetrical three-dimensional spatial organization to the other WT-ITR such that their 3D structures are the same shape in geometrical space. The substantially symmetrical WT-ITR has the same A, C-C′ and B-B′ loops in 3D space. A substantially symmetrical WT-ITR can be functionally confirmed as WT by determining that it has an operable Rep binding site (RBE or RBE′) and terminal resolution site (TRS) that pairs with the appropriate Rep protein. One can optionally test other functions, including transgene expression under permissive conditions.

[0104] As used herein, the phrases of “modified ITR” or “mod-ITR” or “mutant ITR” are used interchangeably herein and refer to an ITR that has a mutation in at least one or more nucleotides as compared to the WT-ITR from the same serotype. The mutation can result in a change in one or more of A, C, C′, B, B′ regions in the ITR, and can result in a change in the three-dimensional spatial organization (i.e. its 3D structure in geometric space) as compared to the 3D spatial organization of a WT-ITR of the same serotype.

[0105] As used herein, the term “asymmetric ITRs” also referred to as “asymmetric ITR pairs” refers to a pair of ITRs within a single ceDNA genome or ceDNA vector that are not inverse complements across their full length. As one non-limiting example, an asymmetric ITR pair does not have a symmetrical three-dimensional spatial organization to their cognate ITR such that their 3D structures are different shapes in geometrical space. Stated differently, an asymmetrical ITR pair have the different overall geometric structure, i.e., they have different organization of their A, C-C′ and B-B′ loops in 3D space (e.g., one ITR may have a short C-C′ arm and/or short B-B′ arm as compared to the cognate ITR). The difference in sequence between the two ITRs may be due to one or more nucleotide addition, deletion, truncation, or point mutation. In one embodiment, one ITR of the asymmetric ITR pair may be a wild-type AAV ITR sequence and the other ITR a modified ITR as defined herein (e.g., a non-wild-type or synthetic ITR sequence). In another embodiment, neither ITRs of the asymmetric ITR pair is a wild-type AAV sequence and the two ITRs are modified ITRs that have different shapes in geometrical space (i.e., a different overall geometric structure). In some embodiments, one mod-ITRs of an asymmetric ITR pair can have a short C-C′ arm and the other ITR can have a different modification (e.g., a single arm, or a short B-B′ arm etc.) such that they have different three-dimensional spatial organization as compared to the cognate asymmetric mod-ITR.

[0106] As used herein, the term “symmetric ITRs” refers to a pair of ITRs within a single ceDNA genome or ceDNA vector that are wild-type or mutated (e.g., modified relative to wild-type) dependoviral ITR sequences and are inverse complements across their full length. In one non-limiting example, both ITRs are wild type ITRs sequences from AAV2. In another example, neither ITRs are wild type ITR AAV2 sequences (i.e., they are a modified ITR, also referred to as a mutant ITR), and can have a difference in sequence from the wild type ITR due to nucleotide addition, deletion, substitution, truncation, or point mutation. For convenience herein, an ITR located 5′ to (upstream of) an expression cassette in a ceDNA vector is referred to as a “5′ ITR” or a “left ITR”, and an ITR located 3′ to (downstream of) an expression cassette in a ceDNA vector is referred to as a “3′ ITR” or a “right ITR”.

[0107] As used herein, the terms “substantially symmetrical modified-ITRs” or a “substantially symmetrical mod-ITR pair” refers to a pair of modified-ITRs within a single ceDNA genome or ceDNA vector that are both that have an inverse complement sequence across their entire length. For example, the modified ITR can be considered substantially symmetrical, even if it has some nucleotide sequences that deviate from the inverse complement sequence so long as the changes do not affect the properties and overall shape. As one non-limiting example, a sequence that has at least 85%, 90%, 95%, 96%, 97%, 98%, or 99% sequence identity to the canonical sequence (as measured using BLAST at default settings), and also has a symmetrical three-dimensional spatial organization to their cognate modified ITR such that their 3D structures are the same shape in geometrical space. Stated differently, a substantially symmetrical modified-ITR pair have the same A, C-C′ and B-B′ loops organized in 3D space. In some embodiments, the ITRs from a mod-ITR pair may have different reverse complement nucleotide sequences but still have the same symmetrical three-dimensional spatial organization—that is both ITRs have mutations that result in the same overall 3D shape. For example, one ITR (e.g., 5′ ITR) in a mod-ITR pair can be from one serotype, and the other ITR (e.g., 3′ ITR) can be from a different serotype, however, both can have the same corresponding mutation (e.g., if the 5′ITR has a deletion in the C region, the cognate modified 3′ITR from a different serotype has a deletion at the corresponding position in the C′ region), such that the modified ITR pair has the same symmetrical three-dimensional spatial organization. In such embodiments, each ITR in a modified ITR pair can be from different serotypes (e.g., AAV1, 2, 3, 4, 5, 6, 7, 8, 9, 10, 11, and 12) such as the combination of AAV2 and AAV6, with the modification in one ITR reflected in the corresponding position in the cognate ITR from a different serotype. In one embodiment, a substantially symmetrical modified ITR pair refers to a pair of modified ITRs (mod-ITRs) so long as the difference in nucleotide sequences between the ITRs does not affect the properties or overall shape and they have substantially the same shape in 3D space. As a non-limiting example, a mod-ITR that has at least 95%, 96%, 97%, 98% or 99% sequence identity to the canonical mod-ITR as determined by standard means well known in the art such as BLAST (Basic Local Alignment Search Tool), or BLASTN at default settings, and also has a symmetrical three-dimensional spatial organization such that their 3D structure is the same shape in geometric space. A substantially symmetrical mod-ITR pair has the same A, C-C′ and B-B′ loops in 3D space, e.g., if a modified ITR in a substantially symmetrical mod-ITR pair has a deletion of a C-C′ arm, then the cognate mod-ITR has the corresponding deletion of the C-C′ loop and also has a similar 3D structure of the remaining A and B-B′ loops in the same shape in geometric space of its cognate mod-ITR.

[0108] The term “flanking” refers to a relative position of one nucleic acid sequence with respect to another nucleic acid sequence. Generally, in the sequence ABC, B is flanked by A and C. The same is true for the arrangement A×B×C. Thus, a flanking sequence precedes or follows a flanked sequence but need not be contiguous with, or immediately adjacent to the flanked sequence. In one embodiment, the term flanking refers to terminal repeats at each end of the linear duplex ceDNA vector.

[0109] As used herein, the terms “treat,” “treating,” and/or “treatment” include abrogating, substantially inhibiting, slowing or reversing the progression of a condition, substantially ameliorating clinical symptoms of a condition, or substantially preventing the appearance of clinical symptoms of a condition, obtaining beneficial or desired clinical results. According to some embodiments, the condition is PKU. Treating further refers to accomplishing one or more of the following: (a) reducing the severity of the disorder; (b) limiting development of symptoms characteristic of the disorder(s) being treated; (c) limiting worsening of symptoms characteristic of the disorder(s) being treated; (d) limiting recurrence of the disorder(s) in patients that have previously had the disorder(s); and (e) limiting recurrence of symptoms in patients that were previously asymptomatic for the disorder(s). Beneficial or desired clinical results, such as pharmacologic and/or physiologic effects include, but are not limited to, preventing the disease, disorder or condition from occurring in a subject that may be predisposed to the disease, disorder or condition but does not yet experience or exhibit symptoms of the disease (prophylactic treatment), alleviation of symptoms of the disease, disorder or condition, diminishment of extent of the disease, disorder or condition, stabilization (i.e., not worsening) of the disease, disorder or condition, preventing spread of the disease, disorder or condition, delaying or slowing of the disease, disorder or condition progression, amelioration or palliation of the disease, disorder or condition, and combinations thereof, as well as prolonging survival as compared to expected survival if not receiving treatment.

[0110] As used herein, the term “increase,” “enhance,” “raise” (and like terms) generally refers to the act of increasing, either directly or indirectly, a concentration, level, function, activity, or behavior relative to the natural, expected, or average, or relative to a control condition.

[0111] As used herein, the term “minimize”, “reduce”, “decrease,” and/or “inhibit” (and like terms) generally refers to the act of reducing, either directly or indirectly, a concentration, level, function, activity, or behavior relative to the natural, expected, or average, or relative to a control condition.

[0112] As used herein, the term “ceDNA genome” refers to an expression cassette that further incorporates at least one inverted terminal repeat region. A ceDNA genome may further comprise one or more spacer regions. In some embodiments the ceDNA genome is incorporated as an intermolecular duplex polynucleotide of DNA into a plasmid or viral genome.

[0113] As used herein, the term “ceDNA spacer region” refers to an intervening sequence that separates functional elements in the ceDNA vector or ceDNA genome. In some embodiments, ceDNA spacer regions keep two functional elements at a desired distance for optimal functionality. In some embodiments, ceDNA spacer regions provide or add to the genetic stability of the ceDNA genome within e.g., a plasmid or baculovirus. In some embodiments, ceDNA spacer regions facilitate ready genetic manipulation of the ceDNA genome by providing a convenient location for cloning sites and the like. For example, in certain aspects, an oligonucleotide “polylinker” containing several restriction endonuclease sites, or a non-open reading frame sequence designed to have no known protein (e.g., transcription factor) binding sites can be positioned in the ceDNA genome to separate the cis-acting factors, e.g., inserting a 2mer, 3mer, 5mer, 6mer, 10mer, 11mer, 12mer, 18mer, 24mer, 30mer, 48mer, 86mer, 176mer, etc. between the terminal resolution site and the upstream transcriptional regulatory element. Similarly, the spacer may be incorporated between the polyadenylation signal sequence and the 3′-terminal resolution site.

[0114] As used herein, the terms “Rep binding site, “Rep binding element, “RBE” and “RBS” are used interchangeably and refer to a binding site for Rep protein (e.g., AAV Rep 78 or AAV Rep 68) which upon binding by a Rep protein permits the Rep protein to perform its site-specific endonuclease activity on the sequence incorporating the RBS. An RBS sequence and its inverse complement together form a single RBS. RBS sequences are known in the art, and include, for example, 5′-GCGCGCTCGCTCGCTC-3′ (SEQ ID NO: 60), an RBS sequence identified in AAV2. Any known RBS sequence may be used in the embodiments of the disclosure, including other known AAV RBS sequences and other naturally known or synthetic RBS sequences. Without being bound by theory it is thought that he nuclease domain of a Rep protein binds to the duplex nucleotide sequence GCTC, and thus the two known AAV Rep proteins bind directly to and stably assemble on the duplex oligonucleotide, 5′-(GCGC)(GCTC)(GCTC)(GCTC)-3′ (SEQ ID NO: 60). In addition, soluble aggregated conformers (i.e., undefined number of inter-associated Rep proteins) dissociate and bind to oligonucleotides that contain Rep binding sites. Each Rep protein interacts with both the nitrogenous bases and phosphodiester backbone on each strand. The interactions with the nitrogenous bases provide sequence specificity whereas the interactions with the phosphodiester backbone are non- or less-sequence specific and stabilize the protein-DNA complex.

[0115] As used herein, the terms “terminal resolution site” and “TRS” are used interchangeably herein and refer to a region at which Rep forms a tyrosine-phosphodiester bond with the 5′ thymidine generating a 3′ OH that serves as a substrate for DNA extension via a cellular DNA polymerase, e.g., DNA pol delta or DNA pol epsilon. Alternatively, the Rep-thymidine complex may participate in a coordinated ligation reaction. In some embodiments, a TRS minimally encompasses a non-base-paired thymidine. In some embodiments, the nicking efficiency of the TRS can be controlled at least in part by its distance within the same molecule from the RBS. When the acceptor substrate is the complementary ITR, then the resulting product is an intramolecular duplex. TRS sequences are known in the art, and include, for example, 5′-GGTTGA-3′ (SEQ ID NO: 61), the hexanucleotide sequence identified in AAV2. Any known TRS sequence may be used in the embodiments of the disclosure, including other known AAV TRS sequences and other naturally known or synthetic TRS sequences such as AGTT (SEQ ID NO: 62), GGTTGG (SEQ ID NO: 63), AGTTGG (SEQ ID NO: 64), AGTTGA (SEQ ID NO: 65), and other motifs such as RRTTRR (SEQ ID NO: 66).

[0116] As used herein, the term “ceDNA-plasmid” refers to a plasmid that comprises a ceDNA genome as an intermolecular duplex.

[0117] As used herein, the term “ceDNA-bacmid” refers to an infectious baculovirus genome comprising a ceDNA genome as an intermolecular duplex that is capable of propagating in E. coli as a plasmid, and so can operate as a shuttle vector for baculovirus.

[0118] As used herein, the term “ceDNA-baculovirus” refers to a baculovirus that comprises a ceDNA genome as an intermolecular duplex within the baculovirus genome.

[0119] As used herein, the terms “ceDNA-baculovirus infected insect cell” and “ceDNA-BIIC” are used interchangeably, and refer to an invertebrate host cell (including, but not limited to an insect cell (e.g., an Sf9 cell)) infected with a ceDNA-baculovirus.

[0120] As used herein, the term “ceDNA” refers to capsid-free closed-ended linear double stranded (ds) duplex DNA for non-viral gene transfer, synthetic or otherwise. Detailed description of ceDNA is described in International Patent Application No. PCT/US2017/020828, filed Mar. 3, 2017, the entire contents of which are expressly incorporated herein by reference. Certain methods for the production of ceDNA comprising various inverted terminal repeat (ITR) sequences and configurations using cell-based methods are described in Example 1 of International Patent Application Nos. PCT/US18/49996, filed Sep. 7, 2018, and PCT/US2018/064242, filed Dec. 6, 2018 each of which is incorporated herein in its entirety by reference. Certain methods for the production of synthetic ceDNA vectors comprising various ITR sequences and configurations are described, e.g., in International Patent Application No. PCT/US2019/14122, filed Jan. 18, 2019, the entire content of which is incorporated herein by reference.

[0121] As used herein, the term “closed-ended DNA vector” refers to a capsid-free DNA vector with at least one covalently closed end and where at least part of the vector has an intramolecular duplex structure.

[0122] As used herein, the terms “ceDNA vector” and “ceDNA” are used interchangeably and refer to a closed-ended DNA vector comprising at least one terminal palindrome. In some embodiments, the ceDNA comprises two covalently-closed ends.

[0123] As used herein, the term “neDNA” or “nicked ceDNA” refers to a closed-ended DNA having a nick or a gap of 1-100 base pairs in a stem region or spacer region 5′ upstream of an open reading frame (e.g., a promoter and transgene to be expressed).

[0124] As used herein, the terms “gap” and “nick” are used interchangeably and refer to a discontinued portion of synthetic DNA vector of the present disclosure, creating a stretch of single stranded DNA portion in otherwise double stranded ceDNA. The gap can be 1 base-pair to 100 base-pair long in length in one strand of a duplex DNA. Typical gaps, designed and created by the methods described herein and synthetic vectors generated by the methods can be, for example, 1, 2, 3, 4, 5, 6, 7, 8, 9, 10, 11, 12, 13, 14, 15, 16, 17, 18, 19, 20, 21, 22, 23, 24, 25, 26, 27, 28, 29, 30, 31, 32, 33, 34, 35, 36, 37, 38, 39, 40, 41, 42, 43, 44, 45, 46, 47, 48, 49, 50, 51, 52, 53, 54, 55, 56, 57, 58, 59 or 60 bp long in length. Exemplified gaps in the present disclosure can be 1 bp to 10 bp long, 1 to 20 bp long, 1 to 30 bp long in length.

[0125] As defined herein, “reporters” refer to proteins that can be used to provide detectable read-outs. Reporters generally produce a measurable signal such as fluorescence, color, or luminescence. Reporter protein coding sequences encode proteins whose presence in the cell or organism is readily observed. For example, fluorescent proteins cause a cell to fluoresce when excited with light of a particular wavelength, luciferases cause a cell to catalyze a reaction that produces light, and enzymes such as β-galactosidase convert a substrate to a colored product. Exemplary reporter polypeptides useful for experimental or diagnostic purposes include, but are not limited to β-lactamase, β-galactosidase (LacZ), alkaline phosphatase (AP), thymidine kinase (TK), green fluorescent protein (GFP) and other fluorescent proteins, chloramphenicol acetyltransferase (CAT), luciferase, and others well known in the art.

[0126] As used herein, the terms “sense” and “antisense” refer to the orientation of the structural element on the polynucleotide. The sense and antisense versions of an element are the reverse complement of each other.

[0127] As used herein, the term “synthetic AAV vector” and “synthetic production of AAV vector” refers to an AAV vector and synthetic production methods thereof in an entirely cell-free environment.

[0128] As used herein, “reporters” refer to proteins that can be used to provide detectable read-outs. Reporters generally produce a measurable signal such as fluorescence, color, or luminescence. Reporter protein coding sequences encode proteins whose presence in the cell or organism is readily observed. For example, fluorescent proteins cause a cell to fluoresce when excited with light of a particular wavelength, luciferases cause a cell to catalyze a reaction that produces light, and enzymes such as β-galactosidase convert a substrate to a colored product. Exemplary reporter polypeptides useful for experimental or diagnostic purposes include, but are not limited to β-lactamase, β-galactosidase (LacZ), alkaline phosphatase (AP), thymidine kinase (TK), green fluorescent protein (GFP) and other fluorescent proteins, chloramphenicol acetyltransferase (CAT), luciferase, and others well known in the art.

[0129] As used herein, the term “effector protein” refers to a polypeptide that provides a detectable read-out, either as, for example, a reporter polypeptide, or more appropriately, as a polypeptide that kills a cell, e.g., a toxin, or an agent that renders a cell susceptible to killing with a chosen agent or lack thereof. Effector proteins include any protein or peptide that directly targets or damages the host cell's DNA and/or RNA. For example, effector proteins can include, but are not limited to, a restriction endonuclease that targets a host cell DNA sequence (whether genomic or on an extrachromosomal element), a protease that degrades a polypeptide target necessary for cell survival, a DNA gyrase inhibitor, and a ribonuclease-type toxin. In some embodiments, the expression of an effector protein controlled by a synthetic biological circuit as described herein can participate as a factor in another synthetic biological circuit to thereby expand the range and complexity of a biological circuit system's responsiveness.

[0130] Transcriptional regulators refer to transcriptional activators and repressors that either activate or repress transcription of a gene of interest, such as PAH. Promoters are regions of nucleic acid that initiate transcription of a particular gene Transcriptional activators typically bind nearby to transcriptional promoters and recruit RNA polymerase to directly initiate transcription. Repressors bind to transcriptional promoters and sterically hinder transcriptional initiation by RNA polymerase. Other transcriptional regulators may serve as either an activator or a repressor depending on where they bind and cellular and environmental conditions. Non-limiting examples of transcriptional regulator classes include, but are not limited to homeodomain proteins, zinc-finger proteins, winged-helix (forkhead) proteins, and leucine-zipper proteins.

[0131] As used herein, a “repressor protein” or “inducer protein” is a protein that binds to a regulatory sequence element and represses or activates, respectively, the transcription of sequences operatively linked to the regulatory sequence element. Preferred repressor and inducer proteins as described herein are sensitive to the presence or absence of at least one input agent or environmental input. Preferred proteins as described herein are modular in form, comprising, for example, separable DNA-binding and input agent-binding or responsive elements or domains.

[0132] As used herein, “carrier” includes any and all solvents, dispersion media, vehicles, coatings, diluents, antibacterial and antifungal agents, isotonic and absorption delaying agents, buffers, carrier solutions, suspensions, colloids, and the like. The use of such media and agents for pharmaceutically active substances is well known in the art. Supplementary active ingredients can also be incorporated into the compositions. The phrase “pharmaceutically-acceptable” refers to molecular entities and compositions that do not produce a toxic, an allergic, or similar untoward reaction when administered to a host.

[0133] As used herein, an “input agent responsive domain” is a domain of a transcription factor that binds to or otherwise responds to a condition or input agent in a manner that renders a linked DNA binding fusion domain responsive to the presence of that condition or input. In one embodiment, the presence of the condition or input results in a conformational change in the input agent responsive domain, or in a protein to which it is fused, that modifies the transcription-modulating activity of the transcription factor.

[0134] The term “in vivo” refers to assays or processes that occur in or within an organism, such as a multicellular animal. In some of the aspects described herein, a method or use can be said to occur “in vivo” when a unicellular organism, such as a bacterium, is used. The term “ex vivo” refers to methods and uses that are performed using a living cell with an intact membrane that is outside of the body of a multicellular animal or plant, e.g., explants, cultured cells, including primary cells and cell lines, transformed cell lines, and extracted tissue or cells, including blood cells, among others. The term “in vitro” refers to assays and methods that do not require the presence of a cell with an intact membrane, such as cellular extracts, and can refer to the introducing of a programmable synthetic biological circuit in a non-cellular system, such as a medium not comprising cells or cellular systems, such as cellular extracts.

[0135] The term “promoter,” as used herein, refers to any nucleic acid sequence that regulates the expression of another nucleic acid sequence by driving transcription of the nucleic acid sequence, which can be a target gene, e.g., a heterologous target gene, encoding a protein or an RNA. Promoters can be constitutive, inducible, repressible, tissue-specific, or any combination thereof. A promoter is a control region of a nucleic acid sequence at which initiation and rate of transcription of the remainder of a nucleic acid sequence are controlled. A promoter can also contain genetic elements at which regulatory proteins and molecules can bind, such as RNA polymerase and other transcription factors. In some embodiments of the aspects described herein, a promoter can drive the expression of a transcription factor that regulates the expression of the promoter itself. Within the promoter sequence will be found a transcription initiation site, as well as protein binding domains responsible for the binding of RNA polymerase. Eukaryotic promoters will often, but not always, contain “TATA” boxes and “CAT” boxes. Various promoters, including inducible promoters, may be used to drive the expression of transgenes in the ceDNA vectors disclosed herein. A promoter sequence may be bounded at its 3′ terminus by the transcription initiation site and extends upstream (5′ direction) to include the minimum number of bases or elements necessary to initiate transcription at levels detectable above background. According to some embodiments, the promoter is selected from the group consisting of the VD promoter, human alpha 1-antitrypsin (hAAT) promoter (including the hAAT(979) promoter and the CpGmin_hAAT promoters such as hAAT_core_C06; hAAT_core_C07; hAAT_core_C08; hAAT_core_C09; hAAT_core_C10; or hAAT_core truncated and the transthyretin (TTR) liver specific promoter, including the minimal TTR (TTRm).

[0136] The term “enhancer” as used herein refers to a cis-acting regulatory sequence (e.g., 50-1,500 base pairs) that binds one or more proteins (e.g., activator proteins, or transcription factor) to increase transcriptional activation of a nucleic acid sequence. Enhancers can be positioned up to 1,000,000 base pars upstream of the gene start site or downstream of the gene start site that they regulate. An enhancer can be positioned within an intronic region, or in the exonic region of an unrelated gene. According to some embodiments, the enhancer is selected from the group consisting of a serpin enhancer (SerpEnh) of human origin or other mammalian origin such as bushbaby or Chinese tree shrew, TTR enhancer (TTRe), Hepatic Nuclear Factor 1 binding site (HNF1), Hepatic Nuclear Factor 4 binding site (HNF4), human apolipoprotein E/C-I Liver specific enhancer (ApoE Enh), enhancer regions from Pro-albumin gene (ProEnh), CpG minimized ApoE enhancers (e.g., ApoE enhancer C03, ApoE enhancer C04, ApoE enhancer C09, or ApoE enhancer C10 as described herein), HCR1 footprint123 (embedded HCR1 footprint123), Hepatic Nuclear Factor enhancer array (Embedded enhancer HNF array), and derivative of human apolipoprotine E/C-I liver specific enhancer (e.g., ApoE Enh v2). According to some embodiments, the enhancer can be a multitude (e.g., tandem repeat) of a single enhancer element, or different type of enhancers like 3×HNF1-4_Pro-Albumin Enhancer as in ceDNA1471 in which the enhancers are linked to a TTR promoter) or 5×HNF1_Pro-Albumin Enhancer (as in ceDNA1473 in which the enhancers are linked to a TTR promoter). According to some embodiments, the multitude of enhancers, such as HNF1 and/or HNF4 may contain spacer regions between every two enhancer elements, e.g., 1-20 nucleotides, or about 1, 2, 3, 4, 5, 6, 7, 8, 9, 10, 11, 12, 13, 14, 15, 16, 17, 18, 19, or 20 nucleotides.

[0137] A promoter can be said to drive expression or drive transcription of the nucleic acid sequence that it regulates. The phrases “operably linked,” “operatively positioned,” “operatively linked,” “under control,” and “under transcriptional control” indicate that a promoter is in a correct functional location and/or orientation in relation to a nucleic acid sequence it regulates to control transcriptional initiation and/or expression of that sequence. An “inverted promoter,” as used herein, refers to a promoter in which the nucleic acid sequence is in the reverse orientation, such that what was the coding strand is now the non-coding strand, and vice versa. Inverted promoter sequences can be used in various embodiments to regulate the state of a switch. In addition, in various embodiments, a promoter can be used in conjunction with an enhancer.

[0138] A promoter can be one naturally associated with a gene or sequence, as can be obtained by isolating the 5′ non-coding sequences located upstream of the coding segment and/or exon of a given gene or sequence. Such a promoter can be referred to as “endogenous.” Similarly, in some embodiments, an enhancer can be one naturally associated with a nucleic acid sequence, located either downstream or upstream of that sequence.

[0139] In some embodiments, a coding nucleic acid segment is positioned under the control of a “recombinant promoter” or “heterologous promoter,” both of which refer to a promoter that is not normally associated with the encoded nucleic acid sequence it is operably linked to in its natural environment. A recombinant or heterologous enhancer refers to an enhancer not normally associated with a given nucleic acid sequence in its natural environment. Such promoters or enhancers can include promoters or enhancers of other genes; promoters or enhancers isolated from any other prokaryotic, viral, or eukaryotic cell; and synthetic promoters or enhancers that are not “naturally occurring,” i.e., comprise different elements of different transcriptional regulatory regions, and/or mutations that alter expression through methods of genetic engineering that are known in the art. In addition to producing nucleic acid sequences of promoters and enhancers synthetically, promoter sequences can be produced using recombinant cloning and/or nucleic acid amplification technology, including PCR, in connection with the synthetic biological circuits and modules disclosed herein (see, e.g., U.S. Pat. Nos. 4,683,202, 5,928,906, each incorporated herein by reference). Furthermore, it is contemplated that control sequences that direct transcription and/or expression of sequences within non-nuclear organelles such as mitochondria, chloroplasts, and the like, can be employed as well. Non-limiting examples of such a recombinant or heterologous promoter/enhancer include a serpin enhancer with a TTR promoter (referred to as “Vandendriessche promoter” (VD) or Vandendriesche (VD) promoter set (see, e.g., U.S. Pat. No. 10,149,914, incorporated herein by reference) or 3× serpin enhancers with a TTR promoter (referred to as “3× VD” promoter set; see, e.g., U.S. Patent Application Publication No. US 2018/0071406A1, incorporated herein by reference).

[0140] In some embodiments, a promoter can be a promoter set. The term “promoter set,” as used herein, refers to a system comprising one or more promoters (or promoter sequences) as defined herein and one or more enhancers (or enhancer sequences) as defined herein. The term “promoter set” as used herein encompasses sequences whereby the promoter and enhancer elements or sequences are separated by spacer regions or sequences that are about 1-50 nucleotides in length, e.g., about 2, 5, 7, 8, 10, 11, 12, 13, 15, 17, 18, 20, 22, 23, 25, 27, 28, 30, 32, 33, 35, 37, 38, 40, 42, 43, 45, 47, 48, or 50 nucleotides.

[0141] The terms “DNA regulatory sequences,” “control elements,” and “regulatory elements,” used interchangeably herein, refer to transcriptional and translational control sequences, such as promoters, enhancers, polyadenylation signals, terminators, protein degradation signals, and the like, that provide for and/or regulate transcription of a non-coding sequence (e.g., DNA-targeting RNA) or a coding sequence (e.g., site-directed modifying polypeptide, or Cas9/Csn1 polypeptide) and/or regulate translation of an encoded polypeptide.

[0142] “Operably linked” refers to a juxtaposition wherein the components so described are in a relationship permitting them to function in their intended manner. For instance, a promoter is operably linked to a coding sequence if the promoter affects its transcription or expression. An “expression cassette” includes a DNA sequence, e.g., a heterologous DNA sequence, that is operably linked to a promoter or other regulatory sequence sufficient to direct transcription of the transgene in the ceDNA vector. Suitable promoters include, for example, tissue specific promoters. Promoters can also be of AAV origin.

[0143] The term “subject” as used herein refers to a human or animal, to whom treatment, including prophylactic treatment, with the ceDNA vector according to the present disclosure, is provided. Usually, the animal is a vertebrate such as, but not limited to a primate, rodent, domestic animal or game animal. Primates include but are not limited to, chimpanzees, cynomologous monkeys, spider monkeys, and macaques, e.g., Rhesus. Rodents include mice, rats, woodchucks, ferrets, rabbits and hamsters. Domestic and game animals include, but are not limited to, cows, horses, pigs, deer, bison, buffalo, feline species, e.g., domestic cat, canine species, e.g., dog, fox, wolf, avian species, e.g., chicken, emu, ostrich, and fish, e.g., trout, catfish and salmon. In certain embodiments of the aspects described herein, the subject is a mammal, e.g., a primate or a human. A subject can be male or female. Additionally, a subject can be an infant or a child. In some embodiments, the subject can be a neonate or an unborn subject, e.g., the subject is in utero. Preferably, the subject is a mammal. The mammal can be a human, non-human primate, mouse, rat, dog, cat, horse, or cow, but is not limited to these examples. Mammals other than humans can be advantageously used as subjects that represent animal models of diseases and disorders. In addition, the methods and compositions described herein can be used for domesticated animals and/or pets. A human subject can be of any age, gender, race or ethnic group, e.g., Caucasian (white), Asian, African, black, African American, African European, Hispanic, Mideastern, etc. In some embodiments, the subject can be a patient or other subject in a clinical setting. In some embodiments, the subject is already undergoing treatment. In some embodiments, the subject is an embryo, a fetus, neonate, infant, child, adolescent, or adult. In some embodiments, the subject is a human fetus, human neonate, human infant, human child, human adolescent, or human adult. In some embodiments, the subject is an animal embryo, or non-human embryo or non-human primate embryo. In some embodiments, the subject is a human embryo.

[0144] As used herein, the term “host cell”, includes any cell type that is susceptible to transformation, transfection, transduction, and the like with a nucleic acid construct or ceDNA expression vector of the present disclosure. As non-limiting examples, a host cell can be an isolated primary cell, pluripotent stem cells, CD34⁺ cells), induced pluripotent stem cells, or any of a number of immortalized cell lines (e.g., HepG2 cells). Alternatively, a host cell can be an in situ or in vivo cell in a tissue, organ or organism.

[0145] The term “exogenous” refers to a substance present in a cell other than its native source. The term “exogenous” when used herein can refer to a nucleic acid (e.g., a nucleic acid encoding a polypeptide) or a polypeptide that has been introduced by a process involving the hand of man into a biological system such as a cell or organism in which it is not normally found and one wishes to introduce the nucleic acid or polypeptide into such a cell or organism. Alternatively, “exogenous” can refer to a nucleic acid or a polypeptide that has been introduced by a process involving the hand of man into a biological system such as a cell or organism in which it is found in relatively low amounts and one wishes to increase the amount of the nucleic acid or polypeptide in the cell or organism, e.g., to create ectopic expression or levels. In contrast, the term “endogenous” refers to a substance that is native to the biological system or cell.

[0146] The term “sequence identity” refers to the relatedness between two nucleic acid sequences. For purposes of the present disclosure, the degree of sequence identity between two deoxyribonucleotide sequences is determined using the Needleman-Wunsch algorithm (Needleman and Wunsch, 1970, supra) as implemented in the Needle program of the EMBOSS package (EMBOSS: The European Molecular Biology Open Software Suite, Rice et al., 2000, supra), preferably version 3.0.0 or later. The optional parameters used are gap open penalty of 10, gap extension penalty of 0.5, and the EDNAFULL (EMBOSS version of NCBI NUC4.4) substitution matrix. The output of Needle labeled “longest identity” (obtained using the -nobrief option) is used as the percent identity and is calculated as follows: (Identical Deoxyribonucleotides.times.100)/(Length of Alignment−Total Number of Gaps in Alignment). The length of the alignment is preferably at least 10 nucleotides, preferably at least 25 nucleotides more preferred at least 50 nucleotides and most preferred at least 100 nucleotides.

[0147] The term “homology” or “homologous” as used herein is defined as the percentage of nucleotide residues that are identical to the nucleotide residues in the corresponding sequence on the target chromosome, after aligning the sequences and introducing gaps, if necessary, to achieve the maximum percent sequence identity. Alignment for purposes of determining percent nucleotide sequence homology can be achieved in various ways that are within the skill in the art, for instance, using publicly available computer software such as BLAST, BLAST-2, ALIGN, ClustalW2 or Megalign (DNASTAR) software. Those skilled in the art can determine appropriate parameters for aligning sequences, including any algorithms needed to achieve maximal alignment over the full length of the sequences being compared. In some embodiments, a nucleic acid sequence (e.g., DNA sequence), for example of a homology arm, is considered “homologous” when the sequence is at least 70%, at least 75%, at least 80%, at least 85%, at least 90%, at least 91%, at least 92%, at least 93%, at least 94%, at least 95%, at least 96%, at least 97%, at least 98%, at least 99%, or more, identical to the corresponding native or unedited nucleic acid sequence (e.g., genomic sequence) of the host cell.

[0148] The term “heterologous,” as used herein, means a nucleic acid or polypeptide sequence that is not found in the native nucleic acid or protein, respectively. A heterologous nucleic acid sequence may be linked to a naturally-occurring nucleic acid sequence (or a variant thereof) (e.g., by genetic engineering) to generate a chimeric nucleic acid sequence encoding a chimeric polypeptide. A heterologous nucleic acid sequence may be linked to a variant polypeptide (e.g., by genetic engineering) to generate a nucleic acid sequence encoding a fusion variant polypeptide.

[0149] A “vector” or “expression vector” is a replicon, such as plasmid, bacmid, phage, virus, virion, or cosmid, to which another DNA segment, i.e., an “insert”, may be attached so as to bring about the replication of the attached segment in a cell. A vector can be a nucleic acid construct designed for delivery to a host cell or for transfer between different host cells. As used herein, a vector can be viral or non-viral in origin and/or in final form, however for the purpose of the present disclosure, a “vector” generally refers to a ceDNA vector, as that term is used herein. The term “vector” encompasses any genetic element that is capable of replication when associated with the proper control elements and that can transfer gene sequences to cells. In some embodiments, a vector can be an expression vector or recombinant vector.

[0150] As used herein, the term “expression vector” refers to a vector that directs expression of an RNA or polypeptide from sequences linked to transcriptional regulatory sequences on the vector. The sequences expressed will often, but not necessarily, be heterologous to the cell. An expression vector may comprise additional elements, for example, the expression vector may have two replication systems, thus allowing it to be maintained in two organisms, for example in human cells for expression and in a prokaryotic host for cloning and amplification. The term “expression” refers to the cellular processes involved in producing RNA and proteins and as appropriate, secreting proteins, including where applicable, but not limited to, for example, transcription, transcript processing, translation and protein folding, modification and processing. “Expression products” include RNA transcribed from a gene, and polypeptides obtained by translation of mRNA transcribed from a gene. The term “gene” means the nucleic acid sequence which is transcribed (DNA) to RNA in vitro or in vivo when operably linked to appropriate regulatory sequences. The gene may or may not include regions preceding and following the coding region, e.g., 5′ untranslated (5′UTR) or “leader” sequences and 3′ UTR or “trailer” sequences, as well as intervening sequences (introns) between individual coding segments (exons).

[0151] By “recombinant vector” is meant a vector that includes a nucleic acid sequence, e.g., a heterologous nucleic acid or “transgene”, that is capable of expression in vivo. It should be understood that the vectors described herein can, in some embodiments, be combined with other suitable compositions and therapies. In some embodiments, the vector is episomal. The use of a suitable episomal vector provides a means of maintaining the nucleotide of interest in the subject in high copy number extra chromosomal DNA thereby eliminating potential effects of chromosomal integration.

[0152] The phrase “genetic disease” as used herein refers to a disease, partially or completely, directly or indirectly, caused by one or more abnormalities in the genome, especially a condition that is present from birth. The abnormality may be a mutation, an insertion or a deletion. The abnormality may affect the coding sequence of the gene or its regulatory sequence. The genetic disease may be, but not limited to PKU, DMD, hemophilia, cystic fibrosis, Huntington's chorea, familial hypercholesterolemia (LDL receptor defect), hepatoblastoma, Wilson's disease, congenital hepatic porphyria, inherited disorders of hepatic metabolism, Lesch Nyhan syndrome, sickle cell anemia, thalassaemias, xeroderma pigmentosum, Fanconi's anemia, retinitis pigmentosa, ataxia telangiectasia, Bloom's syndrome, retinoblastoma, and Tay-Sachs disease.

[0153] As used herein the term “comprising” or “comprises” is used in reference to compositions, methods, and respective component(s) thereof, that are essential to the method or composition, yet open to the inclusion of unspecified elements, whether essential or not.

[0154] As used herein the term “consisting essentially of” refers to those elements required for a given embodiment. The term permits the presence of elements that do not materially affect the basic and novel or functional characteristic(s) of that embodiment. The use of “comprising” indicates inclusion rather than limitation.

[0155] The term “consisting of” refers to compositions, methods, and respective components thereof as described herein, which are exclusive of any element not recited in that description of the embodiment.

[0156] As used herein the term “consisting essentially of” refers to those elements required for a given embodiment. The term permits the presence of additional elements that do not materially affect the basic and novel or functional characteristic(s) of that embodiment of the disclosure.

[0157] As used in this specification and the appended claims, the singular forms “a,” “an,” and “the” include plural references unless the context clearly dictates otherwise. Thus, for example, references to “the method” includes one or more methods, and/or steps of the type described herein and/or which will become apparent to those persons skilled in the art upon reading this disclosure and so forth. Similarly, the word “or” is intended to include “and” unless the context clearly indicates otherwise. Although methods and materials similar or equivalent to those described herein can be used in the practice or testing of this disclosure, suitable methods and materials are described below. The abbreviation, “e.g.” is derived from the Latin exempli gratia, and is used herein to indicate a non-limiting example. Thus, the abbreviation “e.g.” is synonymous with the term “for example.”

[0158] Groupings of alternative elements or embodiments of the disclosure disclosed herein are not to be construed as limitations. Each group member can be referred to and claimed individually or in any combination with other members of the group or other elements found herein. One or more members of a group can be included in, or deleted from, a group for reasons of convenience and/or patentability. When any such inclusion or deletion occurs, the specification is herein deemed to contain the group as modified thus fulfilling the written description of all Markush groups used in the appended claims.

[0159] In some embodiments of any of the aspects, the disclosure described herein does not concern a process for cloning human beings, processes for modifying the germ line genetic identity of human beings, uses of human embryos for industrial or commercial purposes or processes for modifying the genetic identity of animals which are likely to cause them suffering without any substantial medical benefit to man or animal, and also animals resulting from such processes.

[0160] Other terms are defined herein within the description of the various aspects of the disclosure.

[0161] All patents and other publications; including literature references, issued patents, published patent applications, and co-pending patent applications; cited throughout this application are expressly incorporated herein by reference for the purpose of describing and disclosing, for example, the methodologies described in such publications that might be used in connection with the technology described herein. These publications are provided solely for their disclosure prior to the filing date of the present application. Nothing in this regard should be construed as an admission that the inventors are not entitled to antedate such disclosure by virtue of prior disclosure or for any other reason. All statements as to the date or representation as to the contents of these documents is based on the information available to the applicants and does not constitute any admission as to the correctness of the dates or contents of these documents.

[0162] The description of embodiments of the disclosure is not intended to be exhaustive or to limit the disclosure to the precise form disclosed. While specific embodiments of, and examples for, the disclosure are described herein for illustrative purposes, various equivalent modifications are possible within the scope of the disclosure, as those skilled in the relevant art will recognize. For example, while method steps or functions are presented in a given order, alternative embodiments may perform functions in a different order, or functions may be performed substantially concurrently. The teachings of the disclosure provided herein can be applied to other procedures or methods as appropriate. The various embodiments described herein can be combined to provide further embodiments. Aspects of the disclosure can be modified, if necessary, to employ the compositions, functions and concepts of the above references and application to provide yet further embodiments of the disclosure. Moreover, due to biological functional equivalency considerations, some changes can be made in protein structure without affecting the biological or chemical action in kind or amount. These and other changes can be made to the disclosure in light of the detailed description. All such modifications are intended to be included within the scope of the appended claims.

[0163] Specific elements of any of the foregoing embodiments can be combined or substituted for elements in other embodiments. Furthermore, while advantages associated with certain embodiments of the disclosure have been described in the context of these embodiments, other embodiments may also exhibit such advantages, and not all embodiments need necessarily exhibit such advantages to fall within the scope of the disclosure.

[0164] The technology described herein is further illustrated by the following examples which in no way should be construed as being further limiting. It should be understood that this disclosure is not limited to the particular methodology, protocols, and reagents, etc., described herein and as such can vary. The terminology used herein is for the purpose of describing particular embodiments only, and is not intended to limit the scope of the present disclosure, which is defined solely by the claims.

### II. Expression of an PAH Protein from a Closed Ended DNA (ceDNA) Vector

[0165] The technology described herein is directed in general to the expression and/or production of PAH protein in a cell from a non-viral DNA vector, e.g., a ceDNA vector as described herein. ceDNA vectors for expression of PAH protein are described herein in the section entitled “ceDNA vectors in general”. In particular, ceDNA vectors for expression of PAH protein comprise a pair of ITRs (e.g., symmetric or asymmetric as described herein) and between the ITR pair, a nucleic acid encoding an PAH protein, wherein the nucleic acid is codon optimized, as described herein, operatively linked to a promoter or regulatory sequence. A distinct advantage of ceDNA vectors for expression of PAH protein over traditional AAV vectors, and even lentiviral vectors, is that there is no size constraint for the nucleic acid sequences encoding a desired protein. Thus, even a full length 6.8 kb PAH protein can be expressed from a single ceDNA vector. Thus, the ceDNA vectors described herein can be used to express a therapeutic PAH protein in a subject in need thereof, e.g., a subject with PKU.

[0166] As one will appreciate, the ceDNA vector technologies described herein can be adapted to any level of complexity or can be used in a modular fashion, where expression of different components of a PAH protein can be controlled in an independent manner. For example, it is specifically contemplated that the ceDNA vector technologies designed herein can be as simple as using a single ceDNA vector to express a single gene sequence (e.g., a PAH protein) or can be as complex as using multiple ceDNA vectors, where each vector expresses multiple PAH proteins or associated co-factors or accessory proteins that are each independently controlled by different promoters. The following embodiments are specifically contemplated herein and can adapted by one of skill in the art as desired.

[0167] In one embodiment, a single ceDNA vector can be used to express a single component of a PAH protein. Alternatively, a single ceDNA vector can be used to express multiple components (e.g., at least 2) of a PAH protein under the control of a single promoter (e.g., a strong promoter), optionally using an IRES sequence(s) to ensure appropriate expression of each of the components, e.g., co-factors or accessory proteins.

[0168] According to the present disclosure, the nucleic acids encoding the human PAH protein are codon optimized.

[0169] Additional variations of ceDNA vector technologies can be envisioned by one of skill in the art or can be adapted from protein production methods using conventional vectors.

### A. Nucleic Acids

[0170] The characterization and development of nucleic acid molecules for potential therapeutic use are provided herein. As described herein, the nucleic acids for therapeutic use encode a PAH protein, wherein the nucleic acids are codon optimized. In some embodiments, chemical modification of oligonucleotides for the purpose of altered and improved in vivo properties (delivery, stability, life-time, folding, target specificity), as well as their biological function and mechanism that directly correlate with therapeutic application, are described where appropriate.

[0171] Illustrative therapeutic nucleic acids of the present disclosure that can be immunostimulatory and require use of immunosuppressants disclosed herein can include, but are not limited to, minigenes, plasmids, minicircles, small interfering RNA (siRNA), microRNA (miRNA), antisense oligonucleotides (ASO), ribozymes, closed ended double stranded DNA (e.g., ceDNA, CELiD, linear covalently closed DNA (“ministring”), doggybone (dbDNA™), protelomere closed ended DNA, or dumbbell linear DNA), dicer-substrate dsRNA, small hairpin RNA (shRNA), asymmetrical interfering RNA (aiRNA), guide RNA (gRNA), microRNA (miRNA), mRNA, tRNA, rRNA, DNA viral vectors, viral RNA vector, and any combination thereof.

[0172] According to some embodiments, the therapeutic nucleic acid is a closed ended double stranded DNA, e.g., a ceDNA. According to some embodiments, the expression and/or production of a therapeutic protein in a cell is from a non-viral DNA vector, e.g., a ceDNA vector. A distinct advantage of ceDNA vectors for expression of a therapeutic protein over traditional AAV vectors, and even lentiviral vectors, is that there is no size constraint for the nucleic acid sequences, e.g., heterologous nucleic acid sequences, encoding a desired protein. Thus, even a large therapeutic protein can be expressed from a single ceDNA vector. Thus, ceDNA vectors can be used to express a therapeutic protein in a subject in need thereof.

[0173] In general, a ceDNA vector for expression of a therapeutic protein as disclosed herein, comprises in the 5′ to 3′ direction: a first adeno-associated virus (AAV) inverted terminal repeat (ITR), a nucleic acid sequence of interest (for example an expression cassette as described herein) and a second AAV ITR. The ITR sequences selected from any of: (i) at least one WT ITR and at least one modified AAV inverted terminal repeat (mod-ITR) (e.g., asymmetric modified ITRs); (ii) two modified ITRs where the mod-ITR pair have a different three-dimensional spatial organization with respect to each other (e.g., asymmetric modified ITRs), or (iii) symmetrical or substantially symmetrical WT-WT ITR pair, where each WT-ITR has the same three-dimensional spatial organization, or (iv) symmetrical or substantially symmetrical modified ITR pair, where each mod-ITR has the same three-dimensional spatial organization.

[0174] In some embodiments, a transgene encoding the PAH protein can also encode a secretory sequence so that the PAH protein is directed to the Golgi Apparatus and Endoplasmic Reticulum where a PAH protein is folded into the correct conformation by chaperone molecules as it passes through the ER and out of the cell. Exemplary secretory sequences include, but are not limited to VH-02 (SEQ ID NO: 88) and VK-A26 (SEQ ID NO: 89) and Igx signal sequence (SEQ ID NO: 126), as well as a Glue secretory signal that allows the tagged protein to be secreted out of the cytosol (SEQ ID NO: 188), TMD-ST secretory sequence, that directs the tagged protein to the golgi (SEQ ID NO: 189).

[0175] Regulatory switches can also be used to fine tune the expression of the PAH protein so that the PAH protein is expressed as desired, including but not limited to expression of the PAH protein at a desired expression level or amount, or alternatively, when there is the presence or absence of particular signal, including a cellular signaling event. For instance, as described herein, expression of the PAH protein from the ceDNA vector can be turned on or turned off when a particular condition occurs, as described herein in the section entitled Regulatory Switches.

[0176] For example, and for illustration purposes only, PAH proteins can be used to turn off undesired reaction, such as too high a level of production of the PAH protein. The PAH gene can contain a signal peptide marker to bring the PAH protein to the desired cell. However, in either situation it can be desirable to regulate the expression of the PAH protein. ceDNA vectors readily accommodate the use of regulatory switches.

[0177] A distinct advantage of ceDNA vectors over traditional AAV vectors, and even lentiviral vectors, is that there is no size constraint for the nucleic acid sequences, e.g., heterologous nucleic acid sequences, encoding the PAH protein. Thus, even a full-length PAH, as well as optionally any co-factors or assessor proteins can be expressed from a single ceDNA vector. In addition, depending on the necessary stiochemistry one can express multiple segments of the same PAH protein, and can use same or different promoters, and can also use regulatory switches to fine tune expression of each region. For example, as shown in the Examples, a ceDNA vector that comprises a dual promoter system can be used, so that a different promoter is used for each domain of the PAH protein. Use of a ceDNA plasmid to produce the PAH protein can include a unique combination of promoters for expression of the domains of the PAH protein that results in the proper ratios of each domain for the formation of functional PAH protein. Accordingly, in some embodiments, a ceDNA vector can be used to express different regions of PAH protein separately (e.g., under control of a different promoter).

[0178] In another embodiment, the PAH protein expressed from the ceDNA vectors further comprises an additional functionality, such as fluorescence, enzyme activity, secretion signal or immune cell activator.

[0179] In some embodiments, the ceDNA encoding the PAH protein can further comprise a linker domain, for example. As used herein “linker domain” refers to an oligo- or polypeptide region from about 2 to 100 amino acids in length, which links together any of the domains/regions of the PAH protein as described herein. In some embodiment, linkers can include or be composed of flexible residues such as glycine and serine so that the adjacent protein domains are free to move relative to one another. Longer linkers may be used when it is desirable to ensure that two adjacent domains do not sterically interfere with one another. Linkers may be cleavable or non-cleavable. Examples of cleavable linkers include 2A linkers (for example T2A), 2A-like linkers or functional equivalents thereof and combinations thereof. The linker can be a linker region is T2A derived from Thosea asigna virus.

[0180] It is well within the abilities of one of skill in the art to take a known and/or publically available protein sequence of e.g., the PAH etc., and reverse engineer a cDNA sequence to encode such a protein. The cDNA can then be codon optimized to match the intended host cell and inserted into a ceDNA vector as described herein.

B. ceDNA Vectors Expressing PAH Protein

[0181] A ceDNA vector for expression of PAH protein having one or more sequences encoding a desired PAH can comprise regulatory sequences such as promoters, secretion signals, polyA regions, and enhancers. At a minimum, a ceDNA vector comprises one or more nucleic acid sequences, e.g., heterologous nucleic acid sequences, encoding a PAH protein, wherein the nucleic acid sequence are codon optimized. According to some embodiments, the codon optimized nucleic acids are combined with particular cis-acting elements (e.g., specific promoters and/or specific enhancers) to achieve optimal transgene expression and duration.

[0182] According to some embodiments, the PAH protein comprise an endoplasmic reticulum ER leader sequence to direct it to the ER, where protein folding occurs. For example, a sequence that directs the expressed protein(s) to the ER for folding.

[0183] In some embodiments, a cellular or extracellular localization signal (e.g., secretory signal, nuclear localization signal, mitochondrial localization signal etc.) is comprised in the ceDNA vector to direct the secretion or desired subcellular localization of PAH such that the PAH protein can bind to intracellular target(s) (e.g., an intrabody) or extracellular target(s).

[0184] In some embodiments, a ceDNA vector for expression of PAH protein as described herein permits the assembly and expression of any desired PAH protein in a modular fashion. As used herein, the term “modular” refers to elements in a ceDNA expressing plasmid that can be readily removed from the construct.

[0185] In some embodiments, a ceDNA vector for expression of PAH can have a sequence encoding a full-length PAH protein. In some other embodiments, a ceDNA vector expression of PAH can have a sequence encoding a truncated PAH protein. For example, the truncated PAH may have a deletion at the N-terminal end to remove an autoregulatory region of PAH (e.g., amino acids 1-19 of the full-length PAH). In one embodiment, a ceDNA vector for expression of PAH has a N-terminal truncation of amino acids 1-19.

[0186] In some embodiments, a ceDNA vector can have a PAH sequence with an intron inside of the open reading frame for a functional PAH. In some other embodiments, a ceDNA can have a PAH sequence with heterologous signal sequence (SS). In yet some other embodiments, a ceDNA can have a PAH sequence with DNA nuclear targeting sequence. In yet some other embodiments, a ceDNA vector of a codon optimized PAH can have a 5′ UTR sequence. In yet some other embodiments, a ceDNA vector of a codon optimized PAH can have an intron sequence. In yet some other embodiments, a ceDNA vector of a codon optimized PAH can have a 3′ UTR sequence. In yet some other embodiments, a ceDNA vector of a codon optimized PAH can have one or more enhancer sequences. In yet some other embodiments, a ceDNA vector of a codon optimized PAH can have a promoter sequence. In yet some other embodiments, a ceDNA vector of a codon optimized PAH can have a Kozak sequence. In yet some other embodiments, a ceDNA vector of a codon optimized PAH can have a linker/spacer sequence between two cis-acting elements (e.g., enhancer elements) or between a cis-acting element and an open reading frame (ORF).

C. Exemplary PAH Proteins Expressed by ceDNA Vectors

[0187] In particular, a ceDNA vector for expression of PAH protein as disclosed herein can encode, for example, PAH proteins, as well as variants, and/or active fragments thereof, for use in the treatment, prophylaxis, and/or amelioration of one or more symptoms of Phenylketonuria (PKU). In one aspect, the Phenylketonuria (PKU) is a human Phenylketonuria (PKU).
[0188] (i) PAH Therapeutic Proteins and Fragments Thereof

[0189] The present disclosure provides PAH therapeutic proteins or fragments thereof (e.g., functional fragments) that are encoded by codon optimized nucleic acids and expressed in and from a ceDNA vector as described herein. One of skill in the art will understand that PAH therapeutic protein includes all splice variants and orthologs of the PAH protein. PAH therapeutic protein includes intact molecules as well as truncated fragments (e.g., functional) thereof.

[0190] A distinct advantage of ceDNA vectors over traditional AAV vectors, and even lentiviral vectors, is that there is no size constraint for the nucleic acid sequences, e.g., heterologous nucleic acid sequences, encoding a desired protein. Thus, multiple full-length PAH therapeutic proteins can be expressed from a single ceDNA vector.

[0191] PAH protein and gene: The PAH gene is located on chromosome 12 in the bands 12q22-q24.2. As of 2000, around 400 disease-causing mutations had been found in the PAH gene. Phenylalanine Hydroxylase (PAH) can also be referred to as Phenylalanine 4-Monooxygenase, Phenylalanine-4-Hydroxylase, Phe-4-Monooxygenase, EC 1.14.16.1, EC 1.14.16, PKU1, PKU, or PH.

[0192] The protein sequence for PAH is as follows: Homo sapiens PAH enzyme translation (450 amino acids), accession number NM_000277.3.

(SEQ ID NO: 1025)
MSTAVLENPGLGRKLSDFGQETSYIEDNCNQNGAISLIFSL
KEEVGALAKVLRLFEENDVNLTHIESRPSRLKKDEYEFFT
HLDKRSLPALTNIIKILRHDIGATVHELSRDKKKDTVPWF
PRTIQELDRFANQILSYGAELDADHPGFKDPVYRARRKQF
ADIAYNYRHGQPIPRVEYMEEEKKTWGTVFKTLKSLYKTH
ACYEYNHIFPLLEKYCGFHEDNIPQLEDVSQFLQTCTGFR
LRPVAGLLSSRDFLGGLAFRVFHCTQYIRHGSKPMYTPEP
DICHELLGHVPLFSDRSFAQFSQEIGLASLGAPDEYIEKL
ATIYWFTVEFGLCKQGDSIKAYGAGLLSSFGELQYCLSEK
PKLLPLELEKTAIQNYTVTEFQPLYYVAESFNDAKEKVRN
FAATIPRPFSVRYDPYTQRIEVLDNTQQLKILADSINSEI
GILCSALQK

[0193] PAH is predominantly expressed in the liver, with moderate expression in the kidneys and gallbladder. Low levels of PAH expression can also be detected in the prostate, adrenal gland. During fetal development, PAH can be expressed in the adrenal gland, heart, intestine, lung, and stomach. Accordingly, one can administer a ceDNA vector expressing PAH to any one or more tissues selected from: liver, kidneys, gallbladder, prostate, adrenal. In some embodiments, when a ceDNA vector expressing PAH is administered to an infant, or administered to a subject in utero, one can administer a ceDNA vector expressing PAH to any one or more tissues selected from: liver, adrenal gland, heart, intestine, lung, and stomach.

[0194] Expression of PAH therapeutic protein or fragment thereof from a ceDNA vector can be achieved both spatially and temporally using one or more of the promoters as described herein. In some embodiments, the promoter is selected from the group consisting of: the VD promoter, human alpha 1-antitrypsin (hAAT) promoter (including the hAAT(979) promoter and the CpGmin_hAAT promoter) and the transthyretin (TTR) liver specific promoter.

[0195] According to some embodiments, the nucleic acid encoding the PAH protein is codon optimized, and inserted into a ceDNA vector as described herein.

[0196] As used herein, the term “codon optimized” or “codon optimization” refers to the process of modifying a nucleic acid sequence for enhanced expression in the cells of the vertebrate of interest, e.g., mouse or human, by replacing at least one, more than one, or a significant number of codons of the native sequence (e.g., a prokaryotic sequence) with codons that are more frequently or most frequently used in the genes of that vertebrate. Various species exhibit particular bias for certain codons of a particular amino acid. Typically, codon optimization does not alter the amino acid sequence of the original translated protein. Optimized codons can be determined using e.g., Aptagen's GENE FORGE® codon optimization and custom gene synthesis platform (Aptagen, Inc., 2190 Fox Mill Rd. Suite 300, Herndon, Va. 20171) or another publicly available database. In some embodiments, the nucleic acid encoding the PAH protein is optimized for human expression, and/or is a human PAH, or functional fragment thereof. Exemplary PAH sequences altered for ceDNA expression in conjunction with various cis-acting elements are disclosed herein.

[0197] (ii) PAH Therapeutic Protein Expressing ceDNA Vectors

[0198] A ceDNA vector as described herein comprises one or more codon optimized nucleic acid sequences, e.g., heterologous nucleic acid sequences, encoding a PAH therapeutic protein or functional fragment thereof. In one embodiment, the ceDNA vector comprises a codon optimized nucleic acid sequence encoding a PAH sequence selected from those listed in Table 1A herein.

TABLE 1A
Exemplary human PAH sequences for treatment of PKU

| | SEQ ID |
|---|---|
| Description | NO: |
| Human Phenylalanine Hydroxylase (PAH) Codon Optimized | 382 |
| (hPAH_codop_ORF_v2) | |
| Human Phenylalanine Hydroxylase (PAH) cDNA | 383 |
| (hPAH_cDNA_ORF_v3). | |
| Human Phenylalanine Hydroxylase (PAH) Codon Optimized | 384 |
| (hPAH_codop_ORF_v2_delta2KbIntron_33bpFlanks) | |
| Human Phenylalanine Hydroxylase (PAH) Codon Optimized | 385 |
| (hPAH_codop_ORF_v2_hIVS-intron1_33bpFlanks) | |
| Human Phenylalanine Hydroxylase (PAH) Codon Optimized | 386 |
| (hPAH_codop_ORF_v2_mIVS-intron1B_1bpFlank) | |
| Human Phenylalanine Hydroxylase (PAH) Codon Optimized | 387 |
| (hPAH_codop_ORF_v2_mIVS-intron1B_33bpFlanks) | |
| Human Phenylalanine Hydroxylase (PAH) Codon Optimized | 388 |
| (hPAH_Genscript_codop_ORF) | |
| Human Phenylalanine Hydroxylase (PAH) Codon Optimized | 389 |
| (hPAH_codop_ORF_v2_hIVS-intron1_1bpFlank) | |
| Human Phenylalanine Hydroxylase (PAH) Codon Optimized | 390 |
| (hPAH_codop_ORF_v2_33bpFlanks) | |
| Human Phenylalanine Hydroxylase (PAH) Codon Optimized | 391 |
| (hPAH_codop_ORF_v2_5pSpliceFix) | |
| Human Phenylalanine Hydroxylase (PAH) Codon Optimized | 392 |
| (hPAH_codop_ORF_v2_modified_Intron1_33bpFlanks) | |
| Human Phenylalanine Hydroxylase (PAH) Codon Optimized | 393 |
| (hPAH_codop_ORF_v2_C237D) | |
| Human Phenylalanine Hydroxylase (PAH) Codon Optimized | 394 |
| (hPAH_codop_ORF_v2_delta1-29aa) | |
| Human Phenylalanine Hydroxylase (PAH) Codon Optimized | 1011 |
| (hPAH_codop_ORF_v2_R68A) | |
| Human Phenylalanine Hydroxylase (PAH) Codon Optimized | 395 |
| hPAH-ORF_v2B) | |
| Human Phenylalanine Hydroxylase (PAH) Codon Optimized | 396 |
| (hPAH-r3-s7) | |
| Human Phenylalanine Hydroxylase (PAH) Codon Optimized | 397 |
| (hPAH-r3-s32) | |
| Human Phenylalanine Hydroxylase (PAH) Codon Optimized | 398 |
| (hPAH-r3-s34) | |
| Human Phenylalanine Hydroxylase (PAH) Codon Optimized | 399 |
| (hPAH-r3-s41) | |
| Human Phenylalanine Hydroxylase (PAH) Codon Optimized | 400 |
| (hPAH-r4-s21) | |
| Human Phenylalanine Hydroxylase (PAH) Codon Optimized | 401 |
| (hPAH-r4-s27) | |
| Human Phenylalanine Hydroxylase (PAH) Codon Optimized | 1012 |
| (hPAH-r5-s3) | |
| Human Phenylalanine Hydroxylase (PAH) Codon Optimized | 402 |
| (hPAH-r5-s8) | |
| Human Phenylalanine Hydroxylase (PAH) Codon Optimized | 403 |
| (hPAH-r5-s29) | |
| Human Phenylalanine Hydroxylase (PAH) Codon Optimized | 404 |
| (hPAH-r6-28) | |
| Human Phenylalanine Hydroxylase (PAH) Codon Optimized | 405 |
| (hPAH-r6-s20) | |
| Human Phenylalanine Hydroxylase (PAH) Codon Optimized | 406 |
| (hPAH-r7-s1) | |
| Human Phenylalanine Hydroxylase (PAH) Codon Optimized | 407 |
| (hPAH-r7-s23) | |
| Human Phenylalanine Hydroxylase (PAH) Codon Optimized | 408 |
| (hPAH-r8-s1) | |
| Human Phenylalanine Hydroxylase (PAH) Codon Optimized | 1013 |
| (hPAH-r8-s29) | |
| Human Phenylalanine Hydroxylase (PAH) Codon Optimized | 409 |
| (hPAH-r9-s20) | |
| Human Phenylalanine Hydroxylase (PAH) Codon Optimized | 410 |
| (hPAH-r9-s37) | |
| Human Phenylalanine Hydroxylase (PAH) Codon Optimized | 411 |
| (hPAH-r9-s52) | |
| Human Phenylalanine Hydroxylase (PAH) Codon Optimized | 412 |
| (hPAH-r10-s18) | |
| Human Phenylalanine Hydroxylase (PAH) Codon Optimized | 413 |
| (hPAH-r10-s21) | |
| Human Phenylalanine Hydroxylase (PAH) Codon Optimized | 414 |
| (hPAH-r10-s55) | |
| Human Phenylalanine Hydroxylase (PAH) Codon Optimized | 415 |
| (hPAH-r11-s6) | |
| Human Phenylalanine Hydroxylase (PAH) Codon Optimized | 1014 |
| (hPAH-r11-s26) | |
| Human Phenylalanine Hydroxylase (PAH) Codon Optimized | 416 |
| (hPAH-r11-s27) | |
| Human Phenylalanine Hydroxylase (PAH) Codon Optimized | 417 |
| (hPAH-r3-s34::hIVS1B) | |
| Human Phenylalanine Hydroxylase (PAH) Codon Optimized | 418 |
| (hPAH-r3-s34::hIVS1B_33bpFlanks) | |
| Human Phenylalanine Hydroxylase (PAH) Codon Optimized | 419 |
| (hPAH-r3-s34::mIVS) | |
| Human Phenylalanine Hydroxylase (PAH) Codon Optimized | 420 |
| (hPAH-r3-s34::mIVS_33bpFlanks) | |
| Human Phenylalanine Hydroxylase (PAH) Codon Optimized | 421 |
| (hPAH-r3-s34::mod-Intron) | |
| Human Phenylalanine Hydroxylase (PAH) Codon Optimized | 422 |
| (hPAH-r3-s34::mod-Intron_33bpFlanks) | |
| Human Phenylalanine Hydroxylase (PAH) Codon Optimized | 1015 |
| (hPAH-r3-s34::mod-Intron_oIVS-v2) | |
| Human Phenylalanine Hydroxylase (PAH) Codon Optimized | 423 |
| (hPAH-r3-s34::mod-Intron_oIVS-v2_33bpFlanks) | |
| Human Phenylalanine Hydroxylase (PAH) Codon Optimized | 424 |
| (hPAH-r5-s29::hIVS1B) | |
| Human Phenylalanine Hydroxylase (PAH) Codon Optimized | 425 |
| (hPAH-r5-s29::hIVS1B_33bpFlanks) | |
| Human Phenylalanine Hydroxylase (PAH) Codon Optimized | 426 |
| (hPAH-r5-s29::mIVS) | |
| Human Phenylalanine Hydroxylase (PAH) Codon Optimized | 427 |
| (hPAH-r5-s29::mIVS_33bpFlanks) | |
| Human Phenylalanine Hydroxylase (PAH) Codon Optimized | 428 |
| (hPAH-r5-s29::mod-Intron) | |
| Human Phenylalanine Hydroxylase (PAH) Codon Optimized | 429 |
| (hPAH-r5-s29::mod-Intron_33bpFlanks) | |
| Human Phenylalanine Hydroxylase (PAH) Codon Optimized | 430 |
| (hPAH-r5-s29::mod-Intron_oIVS-v2) | |
| Human Phenylalanine Hydroxylase (PAH) Codon Optimized | 431 |
| (hPAH-r5-s29::mod-Intron_oIVS-v2_33bpFlanks) | |
| Human Phenylalanine Hydroxylase (PAH) Codon Optimized | 432 |
| (hPAH_codop_ORF_v2-mod-Intron-oIVS-v2) | |
| Human Phenylalanine Hydroxylase (PAH) Codon Optimized | 433 |
| (hPAH_codop_ORF_v2-mIVS-CpGfree_33bpFlanks) | |
| Human Phenylalanine Hydroxylase (PAH) Codon Optimized | 434 |
| (hPAH_codop_ORF_v2::hIVS-1B-Wt_33bpFlanks) | |
| Human Phenylalanine Hydroxylase (PAH) Codon Optimized | 435 |
| (hPAH-cDNA_0CpG1_ORF) | |
| Human Phenylalanine Hydroxylase (PAH) Codon Optimized | 436 |
| (hPAH-cDNA_0CpG2_ORF) | |
| Human Phenylalanine Hydroxylase (PAH) Codon Optimized | 437 |
| (hPAH-cDNA_0CpG3_ORF) | |
| Human Phenylalanine Hydroxylase (PAH) Codon Optimized | 438 |
| (hPAH-cDNA_0CpG4_ORF) | |
| Human Phenylalanine Hydroxylase (PAH) | 439 |
| (hPAH-cDNA_1_ORF) | |
| Human Phenylalanine Hydroxylase (PAH) | 440 |
| (hPAH-cDNA_2_ORF) | |

TABLE 1B
Exemplary mouse PAH sequence

| Description | SEQ ID NO: |
|---|---|
| Mouse Phenyalanine Hydroxylase PAH | 585 |
| (mousePAH_codop_ORF_v2 | |

[0199] In one embodiment, the ceDNA vector comprises a codon optimized human PAH sequence listed in Table 1A herein. In one embodiment, the ceDNA vector comprises a codon optimized PAH sequence having at least 90% identity to a sequence listed in Table 1A. In one embodiment, the ceDNA vector comprises a codon optimized PAH sequence having at least 91% identity to a sequence listed in Table 1A. In one embodiment, the ceDNA vector comprises a codon optimized PAH sequence having at least 92% identity to a PAH sequence listed in Table 1A. In one embodiment, the ceDNA vector comprises a codon optimized PAH sequence having at least 93% identity to a PAH sequence listed in Table 1A. In one embodiment, the ceDNA vector comprises a codon optimized PAH sequence having at least 94% identity to a PAH sequence listed in Table 1A. In one embodiment, the ceDNA vector comprises a codon optimized PAH sequence having at least 95% identity to a PAH sequence listed in Table 1A. In one embodiment, the ceDNA vector comprises a codon optimized PAH sequence having at least 96% identity to a PAH sequence listed in Table 1A. In one embodiment, the ceDNA vector comprises a codon optimized PAH sequence having at least 97% identity to a PAH sequence listed in Table 1A. In one embodiment, the ceDNA vector comprises a codon optimized PAH sequence having at least 98% identity to a PAH sequence listed in Table 1A. In one embodiment, the ceDNA vector comprises a codon optimized PAH sequence having at least 99% identity to a PAH sequence listed in Table 1A.

[0200] In one embodiment, the PAH sequence has at least 90% identity to SEQ ID NO:382, SEQ ID NO:383, SEQ ID NO:384, SEQ ID NO:385, SEQ ID NO:386, SEQ ID NO:387, NO:389, SEQ ID NO:390, SEQ ID NO:391, SEQ ID NO:392, SEQ ID NO:393, SEQ ID NO:394, SEQ ID NO:395, SEQ ID NO:396, SEQ ID NO:397, SEQ ID NO:398, SEQ ID NO:399, SEQ ID NO:400, SEQ ID NO:401, SEQ ID NO:402, SEQ ID NO:403, SEQ ID NO:404, SEQ ID NO:405, SEQ ID NO:406, SEQ ID NO:407, SEQ ID NO:408, SEQ ID NO:409, SEQ ID NO:410, SEQ ID NO:411, SEQ ID NO:412, SEQ ID NO:413, SEQ ID NO:414, SEQ ID NO:415, SEQ ID NO:416, SEQ ID NO:417, SEQ ID NO:418, SEQ ID NO:419, SEQ ID NO:420, SEQ ID NO:421, SEQ ID NO:422, SEQ ID NO:423, SEQ ID NO:424, SEQ ID NO:425, SEQ ID NO:426, SEQ ID NO:427, SEQ ID NO:428, SEQ ID NO:429, SEQ ID NO:430, SEQ ID NO:431, SEQ ID NO:432, SEQ ID NO:433, SEQ ID NO:434, SEQ ID NO:435, SEQ ID NO:436, SEQ ID NO:437, SEQ ID NO:438, SEQ ID NO:439, SEQ ID NO:440, SEQ ID NO:1011, SEQ ID NO:1012, SEQ ID NO:1013, SEQ ID NO:1014 or SEQ ID NO: 1015. In one embodiment, the PAH sequence has at least 91% identity to any one of SEQ ID NOs:382-440 or SEQ ID NOs: 1011-1015. In one embodiment, the PAH sequence has at least 92% identity to any one of SEQ ID NOs:382-440 or SEQ ID NOs: 1011-1015. In one embodiment, the PAH sequence has at least 93% identity to any one of SEQ ID NOs:382-440 or SEQ ID NOs: 1011-1015. In one embodiment, the PAH sequence has at least 94% identity to any one of SEQ ID NOs:382-440 or SEQ ID NOs: 1011-1015. In one embodiment, the PAH sequence has at least 95% identity to any one of SEQ ID NOs:382-440 or SEQ ID NOs: 1011-1015. In one embodiment, the PAH sequence has at least 96% identity to any one of SEQ ID NOs:382-440 or SEQ ID NOs: 1011-1015. In one embodiment, the PAH sequence has at least 97% identity to any one of SEQ ID NOs:382-440 or SEQ ID NOs: 1011-1015. In one embodiment, the PAH sequence has at least 98% identity to any one of SEQ ID NOs:382-440 or SEQ ID NOs: 1011-1015. In one embodiment, the PAH sequence has at least 99% identity to any one of SEQ ID NOs:382-440 or SEQ ID NOs: 1011-1015. In one embodiment, the PAH sequence comprises a sequence selected from the group consisting of SEQ ID NO:382, SEQ ID NO:383, SEQ ID NO:384, SEQ ID NO:385, SEQ ID NO:386, SEQ ID NO:387, NO:389, SEQ ID NO:390, SEQ ID NO:391, SEQ ID NO:392, SEQ ID NO:393, SEQ ID NO:394, SEQ ID NO:395, SEQ ID NO:396, SEQ ID NO:397, SEQ ID NO:398, SEQ ID NO:399, SEQ ID NO:400, SEQ ID NO:401, SEQ ID NO:402, SEQ ID NO:403, SEQ ID NO:404, SEQ ID NO:405, SEQ ID NO:406, SEQ ID NO:407, SEQ ID NO:408, SEQ ID NO:409, SEQ ID NO:410, SEQ ID NO:411, SEQ ID NO:412, SEQ ID NO:413, SEQ ID NO:414, SEQ ID NO:415, SEQ ID NO:416, SEQ ID NO:417, SEQ ID NO:418, SEQ ID NO:419, SEQ ID NO:420, SEQ ID NO:421, SEQ ID NO:422, SEQ ID NO:423, SEQ ID NO:424, SEQ ID NO:425, SEQ ID NO:426, SEQ ID NO:427, SEQ ID NO:428, SEQ ID NO:429, SEQ ID NO:430, SEQ ID NO:431, SEQ ID NO:432, SEQ ID NO:433, SEQ ID NO:434, SEQ ID NO:435, SEQ ID NO:436, SEQ ID NO:437, SEQ ID NO:438, SEQ ID NO:439, SEQ ID NO:440, SEQ ID NO: 1011, SEQ ID NO: 1012, SEQ ID NO: 1013, SEQ ID NO: 1014, and SEQ ID NO: 1015. In one embodiment, the PAH sequence consists of SEQ ID NO:382, SEQ ID NO:383, SEQ ID NO:384, SEQ ID NO:385, SEQ ID NO:386, SEQ ID NO:387, NO:389, SEQ ID NO:390, SEQ ID NO:391, SEQ ID NO:392, SEQ ID NO:393, SEQ ID NO:394, SEQ ID NO:395, SEQ ID NO:396, SEQ ID NO:397, SEQ ID NO:398, SEQ ID NO:399, SEQ ID NO:400, SEQ ID NO:401, SEQ ID NO:402, SEQ ID NO:403, SEQ ID NO:404, SEQ ID NO:405, SEQ ID NO:406, SEQ ID NO:407, SEQ ID NO:408, SEQ ID NO:409, SEQ ID NO:410, SEQ ID NO:411, SEQ ID NO:412, SEQ ID NO:413, SEQ ID NO:414, SEQ ID NO:415, SEQ ID NO:416, SEQ ID NO:417, SEQ ID NO:418, SEQ ID NO:419, SEQ ID NO:420, SEQ ID NO:421, SEQ ID NO:422, SEQ ID NO:423, SEQ ID NO:424, SEQ ID NO:425, SEQ ID NO:426, SEQ ID NO:427, SEQ ID NO:428, SEQ ID NO:429, SEQ ID NO:430, SEQ ID NO:431, SEQ ID NO:432, SEQ ID NO:433, SEQ ID NO:434, SEQ ID NO:435, SEQ ID NO:436, SEQ ID NO:437, SEQ ID NO:438, SEQ ID NO:439, or SEQ ID NO:440, SEQ ID NO: 1011, SEQ ID NO: 1012, SEQ ID NO: 1013, SEQ ID NO: 1014, or SEQ ID NO: 1015.

[0201] (iii) PAH Therapeutic Proteins and Uses Thereof for the Treatment of PKU

[0202] The ceDNA vectors described herein can be used to deliver therapeutic PAH proteins for treatment of PKU associated with inappropriate expression of the PAH protein and/or mutations within the PAH proteins.

[0203] ceDNA vectors as described herein can be used to express any desired PAH therapeutic protein. Exemplary therapeutic PAH therapeutic proteins include, but are not limited to any PAH protein expressed by the sequences as set forth in Table 1A herein.

[0204] In one embodiment, the expressed PAH therapeutic protein is functional for the treatment of a Phenylketonuria (PKU). In some embodiments, PAH therapeutic protein does not cause an immune system reaction.

[0205] In some embodiments, the ceDNA vector comprises a codon optimized sequence encoding a truncated (fragment) of PAH. In one embodiment, the ceDNA vector comprises a codon optimized sequence encoding a truncated PAH having a deletion of an N-terminal autoregulatory region, e.g., from amino acid 1 to 29 of the full-length PAH protein. In one embodiment, the ceDNA vector comprises SEQ ID NO:394.

[0206] In another embodiment, the ceDNA vectors encoding PAH therapeutic protein or fragment thereof (e.g., functional fragment) can be used to generate a chimeric protein. Thus, it is specifically contemplated herein that a ceDNA vector expressing a chimeric protein can be administered to e.g., to any one or more tissues selected from: liver, kidneys, gallbladder, prostate, adrenal gland. In some embodiments, when a ceDNA vector expressing PAH is administered to an infant, or administered to a subject in utero, one can administer a ceDNA vector expressing PAH to any one or more tissues selected from: liver, adrenal gland, heart, intestine, lung, and stomach, or to a liver stem cell precursor thereof for the in vivo or ex vivo treatment of Phenylketonuria (PKU).

[0207] PKU: PKU is a rare, inherited inborn error of metabolism caused by a mutation in the PAH gene. PAH is an enzyme that is normally expressed in the liver and is necessary to metabolize dietary phenylalanine into tyrosine, an amino acid responsible for the production of neurotransmitters. PKU results from mutations in PAH that render its enzymatic activity deficient. Accordingly, ceDNA vectors expressing an PAH protein can be express PAH in liver. In some embodiments, ceDNA vectors express at least one PAH protein in hepatocytes.

[0208] PAH is normally endogenously expressed in both PR and RPE cell types. It is also reported that low level of PAH expression in RPE may also be required for normal retinal function. Accordingly, low-level or high-level of expression of the PAH protein by the ceDNA vector in PRs and also, optionally RPE cells, may sometimes be needed to prevent retinal degeneration. This level of expression can be fine-tuned by promoters and/or regulatory switches as described herein.

[0209] Accordingly, in some embodiments, the ceDNA vector is used for expression of PAH protein, which is a 6.8 kb protein, from the endogenous promoter (˜1 kb) to restore normal retinoid processing in both photoreceptors and RPE. In some embodiments, a ceDNA vector expressing a PAH protein is via a suprachoroidal or intravitreal route of administration to treat larger area of retina. In some embodiments, the ceDNA vector is administered by any one or more of: subretinal injection, suprachoroidal injection or intravitreal injection.

[0210] The methods comprise administering to the subject an effective amount of a composition comprising a ceDNA vector encoding the PAH therapeutic protein or fragment thereof (e.g., functional fragment) as described herein. As will be appreciated by a skilled practitioner, the term “effective amount” refers to the amount of the ceDNA composition administered that results in expression of the protein in a “therapeutically effective amount” for the treatment of a disease or disorder.

[0211] The dosage ranges for the composition comprising a ceDNA vector encoding the PAH therapeutic protein or fragment thereof (e.g., functional fragment) depends upon the potency (e.g., efficiency of the promoter), and includes amounts large enough to produce the desired effect, e.g., expression of the desired PAH therapeutic protein, for the treatment of Phenylketonuria (PKU). The dosage should not be so large as to cause unacceptable adverse side effects. Generally, the dosage will vary with the particular characteristics of the ceDNA vector, expression efficiency and with the age, condition, and sex of the patient. The dosage can be determined by one of skill in the art and, unlike traditional AAV vectors, can also be adjusted by the individual physician in the event of any complication because ceDNA vectors do not comprise immune activating capsid proteins that prevent repeat dosing.

[0212] Administration of the ceDNA compositions described herein can be repeated for a limited period of time. In some embodiments, the doses are given periodically or by pulsed administration. In a preferred embodiment, the doses recited above are administered over several months. The duration of treatment depends upon the subject's clinical progress and responsiveness to therapy. Booster treatments over time are contemplated. Further, the level of expression can be titrated as the subject grows.

[0213] An PAH therapeutic protein can be expressed in a subject for at least 1 week, at least 2 weeks, at least 1 month, at least 2 months, at least 6 months, at least 12 months/one year, at least 2 years, at least 5 years, at least 10 years, at least 15 years, at least 20 years, at least 30 years, at least 40 years, at least 50 years or more. Long-term expression can be achieved by repeated administration of the ceDNA vectors described herein at predetermined or desired intervals.

[0214] As used herein, the term “therapeutically effective amount” is an amount of an expressed PAH therapeutic protein, or functional fragment thereof that is sufficient to produce a statistically significant, measurable change in expression of a disease biomarker or reduction in a given disease symptom (see “Efficacy Measurement” below). Such effective amounts can be gauged in clinical trials as well as animal studies for a given ceDNA composition.

[0215] Precise amounts of the ceDNA vector required to be administered depend on the judgment of the practitioner and are particular to each individual. Suitable regimes for administration are also variable, but are typified by an initial administration followed by repeated doses at one or more intervals by a subsequent injection or other administration. Alternatively, continuous intravenous infusion sufficient to maintain concentrations in the blood in the ranges specified for in vivo therapies are contemplated, particularly for the treatment of acute diseases/disorders.

[0216] Agents useful in the methods and compositions described herein can be administered topically, intravenously (by bolus or continuous infusion), intracellular injection, intratissue injection, orally, by inhalation, intraperitoneally, intramuscularly, subcutaneously, intracavity, and can be delivered by peristaltic means, if desired, or by other means known by those skilled in the art. The agent can be administered systemically, if so desired. It can also be administered in utero.

[0217] The efficacy of a given treatment for Phenylketonuria (PKU), can be determined by the skilled clinician. However, a treatment is considered “effective treatment,” as the term is used herein, if any one or all of the signs or symptoms of the disease or disorder is/are altered in a beneficial manner, or other clinically accepted symptoms or markers of disease are improved, or ameliorated, e.g., by at least 10% following treatment with a ceDNA vector encoding PAH, or a functional fragment thereof. Efficacy can also be measured by failure of an individual to worsen as assessed by stabilization of the disease, or the need for medical interventions (i.e., progression of the disease is halted or at least slowed). Methods of measuring these indicators are known to those of skill in the art and/or described herein. Treatment includes any treatment of a disease in an individual or an animal (some non-limiting examples include a human, or a mammal) and includes: (1) inhibiting the disease, e.g., arresting, or slowing progression of the disease or disorder; or (2) relieving the disease, e.g., causing regression of symptoms; and (3) preventing or reducing the likelihood of the development of the disease, or preventing secondary diseases/disorders associated with the disease, such as liver or kidney failure. An effective amount for the treatment of a disease means that amount which, when administered to a mammal in need thereof, is sufficient to result in effective treatment as that term is defined herein, for that disease.

[0218] Efficacy of an agent can be determined by assessing physical indicators that are particular to Phenylketonuria (PKU). Standard methods of analysis of PKU indicators are known in the art.

[0219] In some embodiments, a ceDNA vector for expression of PAH protein as disclosed herein can also encode co-factors or other polypeptides, sense or antisense oligonucleotides, or RNAs (coding or non-coding; e.g., siRNAs, shRNAs, gRNA, micro-RNAs, and their antisense counterparts (e.g., antagoMiR)) that can be used in conjunction with the PAH protein expressed from the ceDNA. Additionally, expression cassettes comprising sequence encoding an PAH protein can also include an exogenous sequence that encodes a reporter protein to be used for experimental or diagnostic purposes, such as β-lactamase, β-galactosidase (LacZ), alkaline phosphatase, thymidine kinase, green fluorescent protein (GFP), chloramphenicol acetyltransferase (CAT), luciferase, and others well known in the art.

[0220] In one embodiment, the ceDNA vector comprises a nucleic acid sequence to express the PAH protein that is functional for the treatment of PKU. In a preferred embodiment, the therapeutic PAH protein does not cause an immune system reaction, unless so desired.

### III. ceDNA Vector in General for Use in Production of PAH Therapeutic Proteins

[0221] Embodiments of the disclosure are based on methods and compositions comprising close ended linear duplexed (ceDNA) vectors that can express the PAH transgene. In some embodiments, the transgene is a codon optimized sequence encoding a PAH protein (see, e.g., SEQ ID NOs:382-440 or SEQ ID NOs: 1011-1015). The ceDNA vectors for expression of PAH protein as described herein are not limited by size, thereby permitting, for example, expression of all of the components necessary for expression of a transgene from a single vector. The ceDNA vector for expression of PAH protein is preferably duplex, e.g., self-complementary, over at least a portion of the molecule, such as the expression cassette (e.g., ceDNA is not a double stranded circular molecule). The ceDNA vector has covalently closed ends, and thus is resistant to exonuclease digestion (e.g., exonuclease I or exonuclease III), e.g., for over an hour at 37° C.

[0222] In general, a ceDNA vector for expression of PAH protein as disclosed herein, comprises in the 5′ to 3′ direction: a first adeno-associated virus (AAV) inverted terminal repeat (ITR), a nucleic acid sequence of interest (for example an expression cassette as described herein) and a second AAV ITR. The ITR sequences selected from any of: (i) at least one WT ITR and at least one modified AAV inverted terminal repeat (mod-ITR) (e.g., asymmetric modified ITRs); (ii) two modified ITRs where the mod-ITR pair have a different three-dimensional spatial organization with respect to each other (e.g., asymmetric modified ITRs), or (iii) symmetrical or substantially symmetrical WT-WT ITR pair, where each WT-ITR has the same three-dimensional spatial organization, or (iv) symmetrical or substantially symmetrical modified ITR pair, where each mod-ITR has the same three-dimensional spatial organization. A ceDNA vector for expression of PAH protein can be made from cell-based (e.g., Sf9 or HEK293) production or synthetically using a plurality of oligonucleotides in a cell-free environment.

[0223] Encompassed herein are methods and compositions comprising the ceDNA vector for PAH protein production, which may further include a delivery system, such as a liposome nanoparticle delivery system. Non-limiting exemplary liposome nanoparticle systems are disclosed herein. In some aspects, the disclosure provides for a lipid nanoparticle comprising ceDNA and an ionizable lipid. For example, a lipid nanoparticle formulation that is made and loaded with a ceDNA vector obtained by the process is disclosed in International Application PCT/US2018/050042, filed on Sep. 7, 2018, and International Application PCT/US2020/049266, filed on Sep. 3, 2020 each of which is incorporated herein by reference in its entirety.

[0224] The ceDNA vectors for expression of PAH protein as disclosed herein have no packaging constraints imposed by the limiting space within the viral capsid. ceDNA vectors represent a viable eukaryotically-produced alternative to prokaryote-produced plasmid DNA vectors, as opposed to encapsulated AAV genomes. This permits the insertion of control elements, e.g., regulatory switches as disclosed herein, large transgenes, multiple transgenes etc.

[0225] ceDNA vectors for expression of PAH protein are capsid-free and can be obtained from a plasmid encoding in this order: a first ITR, an expression cassette comprising a transgene and a second ITR. The expression cassette may include one or more regulatory sequences that allows and/or controls the expression of the transgene, e.g., where the expression cassette can comprise one or more of, in this order: an enhancer/promoter, an ORF (transgene encoding PAH), a post-transcription regulatory element (e.g., WPRE), and a polyadenylation and termination signal (e.g., BGH polyA).

[0226] The expression cassette can also comprise an internal ribosome entry site (IRES) and/or a 2A element. The cis-regulatory elements include, but are not limited to, a promoter, a riboswitch, an insulator, a mir-regulatable element, a post-transcriptional regulatory element, a tissue- and cell type-specific promoter and an enhancer. In some embodiments the ITR can act as the promoter for the transgene, e.g., PAH protein. In some embodiments, the ceDNA vector comprises additional components to regulate expression of the transgene, for example, a regulatory switch, which are described herein in the section entitled “Regulatory Switches” for controlling and regulating the expression of the PAH protein, and can include if desired, a regulatory switch which is a kill switch to enable controlled cell death of a cell comprising a ceDNA vector.

[0227] The expression cassette can comprise more than 4000 nucleotides, 5000 nucleotides, 10,000 nucleotides or 20,000 nucleotides, or 30,000 nucleotides, or 40,000 nucleotides or 50,000 nucleotides, or any range between about 4000-10,000 nucleotides or 10,000-50,000 nucleotides, or more than 50,000 nucleotides. In some embodiments, the expression cassette can comprise a transgene in the range of 500 to 50,000 nucleotides in length. In some embodiments, the expression cassette can comprise a transgene in the range of 500 to 75,000 nucleotides in length. In some embodiments, the expression cassette can comprise a transgene which is in the range of 500 to 10,000 nucleotides in length. In some embodiments, the expression cassette can comprise a transgene which is in the range of 1000 to 10,000 nucleotides in length. In some embodiments, the expression cassette can comprise a transgene which is in the range of 500 to 5,000 nucleotides in length. The ceDNA vectors do not have the size limitations of encapsidated AAV vectors, thus enable delivery of a large-size expression cassette to provide efficient transgene expression. In some embodiments, the ceDNA vector is devoid of prokaryote-specific methylation.

[0228] ceDNA expression cassette can include, for example, an expressible exogenous sequence (e.g., open reading frame) or transgene that encodes a protein that is either absent, inactive, or insufficient activity in the recipient subject or a gene that encodes a protein having a desired biological or a therapeutic effect. The transgene can encode a gene product that can function to correct the expression of a defective gene or transcript. In principle, the expression cassette can include any gene that encodes a protein, polypeptide or RNA that is either reduced or absent due to a mutation or which conveys a therapeutic benefit when overexpressed is considered to be within the scope of the disclosure.

[0229] The expression cassette can comprise any transgene (e.g., encoding PAH protein), for example, PAH protein useful for treating PKU in a subject, i.e., a therapeutic PAH protein. According to aspects of the disclosure as described herein, the expression cassette comprises a codon optimized transgene. According to further embodiments, the codon optimized transgene is selected from a nucleic acid sequence set forth in Table 1A.

[0230] A ceDNA vector can be used to deliver and express any PAH protein of interest in the subject, alone or in combination with nucleic acids encoding polypeptides, or non-coding nucleic acids (e.g., RNAi, miRs etc.), as well as exogenous genes and nucleic acid sequences, including virus sequences in a subjects' genome, e.g., HIV virus sequences and the like. Preferably a ceDNA vector disclosed herein is used for therapeutic purposes (e.g., for medical, diagnostic, or veterinary uses) or immunogenic polypeptides. In certain embodiments, a ceDNA vector is useful to express any gene of interest in the subject, which includes one or more polypeptides, peptides, ribozymes, peptide nucleic acids, siRNAs, RNAis, antisense oligonucleotides, antisense polynucleotides, or RNAs (coding or non-coding; e.g., siRNAs, shRNAs, gRNA, micro-RNAs, and their antisense counterparts (e.g., antagoMiR)), antibodies, fusion proteins, or any combination thereof.

[0231] The expression cassette can also encode polypeptides, sense or antisense oligonucleotides, or RNAs (coding or non-coding; e.g., siRNAs, shRNAs, gRNA, micro-RNAs, and their antisense counterparts (e.g., antagoMiR)). Expression cassettes can include an exogenous sequence that encodes a reporter protein to be used for experimental or diagnostic purposes, such as β-lactamase, β-galactosidase (LacZ), alkaline phosphatase, thymidine kinase, green fluorescent protein (GFP), chloramphenicol acetyltransferase (CAT), luciferase, and others well known in the art.

[0232] ceDNA vectors for expression of PAH protein produced by the methods provided herein preferably have a linear and continuous structure rather than a non-continuous structure, as determined by restriction enzyme digestion assay (FIG. 3D). The linear and continuous structure is believed to be more stable from attack by cellular endonucleases, as well as less likely to be recombined and cause mutagenesis. Thus, a ceDNA vector in the linear and continuous structure is a preferred embodiment. The continuous, linear, single strand intramolecular duplex ceDNA vector can have covalently bound terminal ends, without sequences encoding AAV capsid proteins. These ceDNA vectors are structurally distinct from plasmids (including ceDNA plasmids described herein), which are circular duplex nucleic acid molecules of bacterial origin. The complimentary strands of plasmids may be separated following denaturation to produce two nucleic acid molecules, whereas in contrast, ceDNA vectors, while having complimentary strands, are a single DNA molecule and therefore even if denatured, remain a single molecule. In some embodiments, ceDNA vectors as described herein can be produced without DNA base methylation of prokaryotic type, unlike plasmids. Therefore, the ceDNA vectors and ceDNA-plasmids are different both in term of structure (in particular, linear versus circular) and also in view of the methods used for producing and purifying these different objects (see below), and also in view of their DNA methylation which is of prokaryotic type for ceDNA-plasmids and of eukaryotic type for the ceDNA vector.

[0233] There are several advantages of using a ceDNA vector for expression of PAH protein as described herein over plasmid-based expression vectors, such advantages include, but are not limited to: 1) plasmids contain bacterial DNA sequences and are subjected to prokaryotic-specific methylation, e.g., 6-methyl adenosine and 5-methyl cytosine methylation, whereas capsid-free AAV vector sequences are of eukaryotic origin and do not undergo prokaryotic-specific methylation; as a result, capsid-free AAV vectors are less likely to induce inflammatory and immune responses compared to plasmids; 2) while plasmids require the presence of a resistance gene during the production process, ceDNA vectors do not; 3) while a circular plasmid is not delivered to the nucleus upon introduction into a cell and requires overloading to bypass degradation by cellular nucleases, ceDNA vectors contain viral cis-elements, i.e., ITRs, that confer resistance to nucleases and can be designed to be targeted and delivered to the nucleus. It is hypothesized that the minimal defining elements indispensable for ITR function are a Rep-binding site (RBS; 5′-GCGCGCTCGCTCGCTC-3′ (SEQ ID NO: 60) for AAV2) and a terminal resolution site (TRS; 5′-AGTTGG-3′ (SEQ ID NO: 64) for AAV2) plus a variable palindromic sequence allowing for hairpin formation; and 4) ceDNA vectors do not have the over-representation of CpG dinucleotides often found in prokaryote-derived plasmids that reportedly binds a member of the Toll-like family of receptors, eliciting a T cell-mediated immune response. In contrast, transductions with capsid-free AAV vectors disclosed herein can efficiently target cell and tissue-types that are difficult to transduce with conventional AAV virions using various delivery reagent.

### IV. Inverted Terminal Repeats (ITRs)

[0234] As disclosed herein, ceDNA vectors for expression of PAH protein contain nucleic acid, e.g., a transgene or heterologous nucleic acid sequence (e.g., a codon optimized heterologous nucleic acid sequence), positioned between two inverted terminal repeat (ITR) sequences, where the ITR sequences can be an asymmetrical ITR pair or a symmetrical- or substantially symmetrical ITR pair, as these terms are defined herein. A ceDNA vector as disclosed herein can comprise ITR sequences that are selected from any of: (i) at least one WT ITR and at least one modified AAV inverted terminal repeat (mod-ITR) (e.g., asymmetric modified ITRs); (ii) two modified ITRs where the mod-ITR pair have a different three-dimensional spatial organization with respect to each other (e.g., asymmetric modified ITRs), or (iii) symmetrical or substantially symmetrical WT-WT ITR pair, where each WT-ITR has the same three-dimensional spatial organization, or (iv) symmetrical or substantially symmetrical modified ITR pair, where each mod-ITR has the same three-dimensional spatial organization, where the methods of the present disclosure may further include a delivery system, such as but not limited to a liposome nanoparticle delivery system.

[0235] In some embodiments, the ITR sequence can be from viruses of the Parvoviridae family, which includes two subfamilies: Parvovirinae, which infect vertebrates, and Densovirinae, which infect insects. The subfamily Parvovirinae (referred to as the parvoviruses) includes the genus Dependovirus, the members of which, under most conditions, require coinfection with a helper virus such as adenovirus or herpes virus for productive infection. The genus Dependovirus includes adeno-associated virus (AAV), which normally infects humans (e.g., serotypes 2, 3A, 3B, 5, and 6) or primates (e.g., serotypes 1 and 4), and related viruses that infect other warm-blooded animals (e.g., bovine, canine, equine, and ovine adeno-associated viruses). The parvoviruses and other members of the Parvoviridae family are generally described in Kenneth I. Berns, “Parvoviridae: The Viruses and Their Replication,” Chapter 69 in FIELDS VIROLOGY (3d Ed. 1996).

[0236] While ITRs exemplified in the specification and Examples herein are AAV2 WT-ITRs, one of ordinary skill in the art is aware that one can as stated above use ITRs from any known parvovirus, for example a Dependovirus such as AAV (e.g., AAV1, AAV2, AAV3, AAV4, AAV5, AAV 5, AAV7, AAV8, AAV9, AAV10, AAV 11, AAV12, AAVrh8, AAVrh10, AAV-DJ, and AAV-DJ8 genome. E.g., NCBI: NC 002077; NC 001401; NC001729; NC001829; NC006152; NC 006260; NC 006261), chimeric ITRs, or ITRs from any synthetic AAV. In some embodiments, the AAV can infect warm-blooded animals, e.g., avian (AAAV), bovine (BAAV), canine, equine, and ovine adeno-associated viruses. In some embodiments the ITR is from B19 parvovirus (GenBank Accession No: NC 000883), Minute Virus from Mouse (MVM) (GenBank Accession No. NC 001510); goose parvovirus (GenBank Accession No. NC 001701); snake parvovirus 1 (GenBank Accession No. NC 006148). In some embodiments, the 5′ WT-ITR can be from one serotype and the 3′ WT-ITR from a different serotype, as discussed herein.

[0237] An ordinarily skilled artisan is aware that ITR sequences have a common structure of a double-stranded Holliday junction, which typically is a T-shaped or Y-shaped hairpin structure, where each WT-ITR is formed by two palindromic arms or loops (B-B′ and C-C′) embedded in a larger palindromic arm (A-A′), and a single stranded D sequence, (where the order of these palindromic sequences defines the flip or flop orientation of the ITR). See, for example, structural analysis and sequence comparison of ITRs from different AAV serotypes (AAV1-AAV6) and described in Grimm et al., J. Virology, 2006; 80(1); 426-439; Yan et al., J. Virology, 2005; 364-379; Duan et al., Virology 1999; 261; 8-14. One of ordinary skill in the art can readily determine WT-ITR sequences from any AAV serotype for use in a ceDNA vector or ceDNA-plasmid based on the exemplary AAV2 ITR sequences provided herein. See, for example, the sequence comparison of ITRs from different AAV serotypes (AAV1-AAV6, and avian AAV (AAAV) and bovine AAV (BAAV)) described in Grimm et al., J. Virology, 2006; 80(1); 426-439; that show the % identity of the left ITR of AAV2 to the left ITR from other serotypes: AAV-1 (84%), AAV-3 (86%), AAV-4 (79%), AAV-5 (58%), AAV-6 (left ITR) (100%) and AAV-6 (right ITR) (82%).

### A. Symmetrical ITR Pairs

[0238] In some embodiments, a ceDNA vector for expression of PAH protein as described herein comprises, in the 5′ to 3′ direction: a first adeno-associated virus (AAV) inverted terminal repeat (ITR), a nucleic acid sequence of interest (for example an expression cassette as described herein) and a second AAV ITR, where the first ITR (5′ ITR) and the second ITR (3′ ITR) are symmetric, or substantially symmetrical with respect to each other—that is, a ceDNA vector can comprise ITR sequences that have a symmetrical three-dimensional spatial organization such that their structure is the same shape in geometrical space, or have the same A, C-C′ and B-B′ loops in 3D space. In such an embodiment, a symmetrical ITR pair, or substantially symmetrical ITR pair can be modified ITRs (e.g., mod-ITRs) that are not wild-type ITRs. A mod-ITR pair can have the same sequence which has one or more modifications from wild-type ITR and are reverse complements (inverted) of each other. In alternative embodiments, a modified ITR pair are substantially symmetrical as defined herein, that is, the modified ITR pair can have a different sequence but have corresponding or the same symmetrical three-dimensional shape.

[0239] (i) Wildtype ITRs

[0240] In some embodiments, the symmetrical ITRs, or substantially symmetrical ITRs are wild type (WT-ITRs) as described herein. That is, both ITRs have a wild-type sequence, but do not necessarily have to be WT-ITRs from the same AAV serotype. That is, in some embodiments, one WT-ITR can be from one AAV serotype, and the other WT-ITR can be from a different AAV serotype. In such an embodiment, a WT-ITR pair are substantially symmetrical as defined herein, that is, they can have one or more conservative nucleotide modification while still retaining the symmetrical three-dimensional spatial organization.

[0241] Accordingly, as disclosed herein, ceDNA vectors contain a nucleic acid sequence, e.g., transgene or heterologous nucleic acid sequence, positioned between two flanking wild-type inverted terminal repeat (WT-ITR) sequences, that are either the reverse complement (inverted) of each other, or alternatively, are substantially symmetrical relative to each other—that is a WT-ITR pair have symmetrical three-dimensional spatial organization. In some embodiments, a wild-type ITR sequence (e.g., AAV WT-ITR) comprises a functional Rep binding site (RBS; e.g., 5′-GCGCGCTCGCTCGCTC-3′ for AAV2, SEQ ID NO: 60) and a functional terminal resolution site (TRS; e.g., 5′-AGTT-3′, SEQ ID NO: 62).

[0242] In one aspect, ceDNA vectors for expression of PAH protein are obtainable from a vector polynucleotide that encodes a nucleic acid, e.g., heterologous nucleic acid, operatively positioned between two WT inverted terminal repeat sequences (WT-ITRs) (e.g., AAV WT-ITRs). That is, both ITRs have a wild-type sequence, but do not necessarily have to be WT-ITRs from the same AAV serotype. That is, in some embodiments, one WT-ITR can be from one AAV serotype, and the other WT-ITR can be from a different AAV serotype. In such an embodiment, the WT-ITR pair are substantially symmetrical as defined herein, that is, they can have one or more conservative nucleotide modification while still retaining the symmetrical three-dimensional spatial organization. In some embodiments, the 5′ WT-ITR is from one AAV serotype, and the 3′ WT-ITR is from the same or a different AAV serotype. In some embodiments, the 5′ WT-ITR and the 3′WT-ITR are mirror images of each other, that is they are symmetrical. In some embodiments, the 5′ WT-ITR and the 3′ WT-ITR are from the same AAV serotype.

[0243] WT ITRs are well known. In one embodiment the two ITRs are from the same AAV2 serotype. In certain embodiments one can use WT from other serotypes. There are a number of serotypes that are homologous, e.g., AAV2, AAV4, AAV6, AAV8. In one embodiment, closely homologous ITRs (e.g., ITRs with a similar loop structure) can be used. In another embodiment, one can use AAV WT ITRs that are more diverse, e.g., AAV2 and AAV5, and still another embodiment, one can use an ITR that is substantially WT—that is, it has the basic loop structure of the WT but some conservative nucleotide changes that do not alter or affect the properties. When using WT-ITRs from the same viral serotype, one or more regulatory sequences may further be used. In certain embodiments, the regulatory sequence is a regulatory switch that permits modulation of the activity of the ceDNA, e.g., the expression of the encoded PAH protein.

[0244] In some embodiments, one aspect of the technology described herein relates to a ceDNA vector for expression of PAH protein, wherein the ceDNA vector comprises at least one nucleotide sequence, e.g., heterologous nucleic acid sequence, encoding the PAH protein, operably positioned between two wild-type inverted terminal repeat sequences (WT-ITRs), wherein the WT-ITRs can be from the same serotype, different serotypes or substantially symmetrical with respect to each other (i.e., have the symmetrical three-dimensional spatial organization such that their structure is the same shape in geometrical space, or have the same A, C-C′ and B-B′ loops in 3D space). In some embodiments, the symmetric WT-ITRs comprises a functional terminal resolution site and a Rep binding site. In some embodiments, the nucleic acid, e.g., heterologous nucleic acid, sequence encodes a transgene, and wherein the vector is not in a viral capsid.

[0245] In some embodiments, the WT-ITRs are the same but the reverse complement of each other. For example, the sequence AACG in the 5′ ITR may be CGTT (i.e., the reverse complement) in the 3′ ITR at the corresponding site. In one example, the 5′ WT-ITR sense strand comprises the sequence of ATCGATCG (SEQ ID NO: 605) and the corresponding 3′ WT-ITR sense strand comprises CGATCGAT (SEQ ID NO: 606) (i.e., the reverse complement of ATCGATCG (SEQ ID NO: 607)). In some embodiments, the WT-ITRs ceDNA further comprises a terminal resolution site and a replication protein binding site (RPS) (sometimes referred to as a replicative protein binding site), e.g., a Rep binding site.

[0246] Exemplary WT-ITR sequences for use in the ceDNA vectors for expression of PAH protein comprising WT-ITRs are shown in Table 3 herein, which shows pairs of WT-ITRs (5′ WT-ITR and the 3′ WT-ITR).

[0247] In some embodiments, the flanking WT-ITRs are identical and symmetrical with respect to each other. In some other embodiments, the flanking WT-ITRs are substantially symmetrical with respect to each other. In this embodiment, the 5′ WT-ITR can be from one serotype of AAV, and the 3′ WT-ITR from a different serotype of AAV, such that the WT-ITRs are not identical reverse complements. For example, the 5′ WT-ITR can be from AAV2, and the 3′ WT-ITR from a different serotype (e.g. AAV1, 3, 4, 5, 6, 7, 8, 9, 10, 11, and 12. In some embodiments, WT-ITRs can be selected from two different parvoviruses selected from any to of: AAV1, AAV2, AAV3, AAV4, AAV5, AAV6, AAV7, AAV8, AAV9, AAV10, AAV11, AAV12, AAV13, snake parvovirus (e.g., royal python parvovirus), bovine parvovirus, goat parvovirus, avian parvovirus, canine parvovirus, equine parvovirus, shrimp parvovirus, porcine parvovirus, or insect AAV. In some embodiments, such a combination of WT ITRs is the combination of WT-ITRs from AAV2 and AAV6. In one embodiment, the substantially symmetrical WT-ITRs are when one is inverted relative to the other ITR at least 90% identical, at least 95% identical, at least 96% . . . 97% . . . 98% . . . 99% . . . 99.5% and all points in between, and has the same symmetrical three-dimensional spatial organization. In some embodiments, a WT-ITR pair are substantially symmetrical as they have symmetrical three-dimensional spatial organization, e.g., have the same 3D organization of the A, C-C′. B-B′ and D arms. In one embodiment, a substantially symmetrical WT-ITR pair are inverted relative to the other, and are at least 95% identical, at least 96% . . . 97% . . . 98% . . . 99% . . . 99.5% and all points in between, to each other, and one WT-ITR retains the Rep-binding site (RBS) of 5′-GCGCGCTCGCTCGCTC-3′ (SEQ ID NO: 60) and a terminal resolution site (trs). In some embodiments, a substantially symmetrical WT-ITR pair are inverted relative to each other, and are at least 95% identical, at least 96% . . . 97% . . . 98% . . . 99% . . . 99.5% and all points in between, to each other, and one WT-ITR retains the Rep-binding site (RBS) of 5′-GCGCGCTCGCTCGCTC-3′ (SEQ ID NO: 60) and a terminal resolution site (trs) and in addition to a variable palindromic sequence allowing for hairpin secondary structure formation. Homology can be determined by standard means well known in the art such as BLAST (Basic Local Alignment Search Tool), BLASTN at default setting.

[0248] In some embodiments, the structural element of the ITR can be any structural element that is involved in the functional interaction of the ITR with a large Rep protein (e.g., Rep 78 or Rep 68). In certain embodiments, the structural element provides selectivity to the interaction of an ITR with a large Rep protein, i.e., determines at least in part which Rep protein functionally interacts with the ITR. In other embodiments, the structural element physically interacts with a large Rep protein when the Rep protein is bound to the ITR. Each structural element can be, e.g., a secondary structure of the ITR, a nucleic acid sequence of the ITR, a spacing between two or more elements, or a combination of any of the above. In one embodiment, the structural elements are selected from the group consisting of an A and an A′ arm, a B and a B′ arm, a C and a C′ arm, a D arm, a Rep binding site (RBE) and an RBE′ (i.e., complementary RBE sequence), and a terminal resolution sire (trs).

[0249] By way of example only, Table 2 indicates exemplary combinations of WT-ITRs.

[0250] Table 2: Exemplary combinations of WT-ITRs from the same serotype or different serotypes, or different parvoviruses. The order shown is not indicative of the ITR position, for example, “AAV1, AAV2” demonstrates that the ceDNA can comprise a WT-AAV1 ITR in the 5′ position, and a WT-AAV2 ITR in the 3′ position, or vice versa, a WT-AAV2 ITR the 5′ position, and a WT-AAV1 ITR in the 3′ position. Abbreviations: AAV serotype 1 (AAV1), AAV serotype 2 (AAV2), AAV serotype 3 (AAV3), AAV serotype 4 (AAV4), AAV serotype 5 (AAV5), AAV serotype 6 (AAV6), AAV serotype 7 (AAV7), AAV serotype 8 (AAV8), AAV serotype 9 (AAV9), AAV serotype 10 (AAV10), AAV serotype 11 (AAV11), or AAV serotype 12 (AAV12); AAVrh8, AAVrh10, AAV-DJ, and AAV-DJ8 genome (E.g., NCBI: NC 002077; NC 001401; NC001729; NC001829; NC006152; NC 006260; NC 006261), ITRs from warm-blooded animals (avian AAV (AAAV), bovine AAV (BAAV), canine, equine, and ovine AAV), ITRs from B19 parvovirus (GenBank Accession No: NC 000883), Minute Virus from Mouse (MVM) (GenBank Accession No. NC 001510); Goose: goose parvovirus (GenBank Accession No. NC 001701); snake: snake parvovirus 1 (GenBank Accession No. NC 006148).

TABLE 2

| | | | | |
|---|---|---|---|---|
| AAV1, AAV1 | AAV2, AAV2 | AAV3, AAV3 | AAV4, AAV4 | AAV5, AAV5 |
| AAV1, AAV2 | AAV2, AAV3 | AAV3, AAV4 | AAV4, AAV5 | AAV5, AAV6 |
| AAV1, AAV3 | AAV2, AAV4 | AAV3, AAV5 | AAV4, AAV6 | AAV5, AAV7 |
| AAV1, AAV4 | AAV2, AAV5 | AAV3, AAV6 | AAV4, AAV7 | AAV5, AAV8 |
| AAV1, AAV5 | AAV2, AAV6 | AAV3, AAV7 | AAV4, AAV8 | AAV5, AAV9 |
| AAV1, AAV6 | AAV2, AAV7 | AAV3, AAV8 | AAV4, AAV9 | AAV5, AAV10 |
| AAV1, AAV7 | AAV2, AAV8 | AAV3, AAV9 | AAV4, AAV10 | AAV5, AAV11 |
| AAV1, AAV8 | AAV2, AAV9 | AAV3, AAV10 | AAV4, AAV11 | AAV5, AAV12 |
| AAV1, AAV9 | AAV2, AAV10 | AAV3, AAV11 | AAV4, AAV12 | AAV5, AAVRH8 |
| AAV1, AAV10 | AAV2, AAV11 | AAV3, AAV12 | AAV4, AAVRH8 | AAV5, AAVRH10 |
| AAV1, AAV11 | AAV2, AAV12 | AAV3, AAVRH8 | AAV4, AAVRH10 | AAV5, AAV13 |
| AAV1, AAV12 | AAV2, AAVRH8 | AAV3, AAVRH10 | AAV4, AAV13 | AAV5, AAVDJ |
| AAV1, AAVRH8 | AAV2, AAVRH10 | AAV3, AAV13 | AAV4, AAVDJ | AAV5, AAVDJ8 |
| AAV1, AAVRH10 | AAV2, AAV13 | AAV3, AAVDJ | AAV4, AAVDJ8 | AAV5, AVIAN |
| AAV1, AAV13 | AAV2, AAVDJ | AAV3, AAVDJ8 | AAV4, AVIAN | AAV5, BOVINE |
| AAV1, AAVDJ | AAV2, AAVDJ8 | AAV3, AVIAN | AAV4, BOVINE | AAV5, CANINE |
| AAV1, AAVDJ8 | AAV2, AVIAN | AAV3, BOVINE | AAV4, CANINE | AAV5, EQUINE |
| AAV1, AVIAN | AAV2, BOVINE | AAV3, CANINE | AAV4, EQUINE | AAV5, GOAT |
| AAV1, BOVINE | AAV2, CANINE | AAV3, EQUINE | AAV4, GOAT | AAV5, SHRIMP |
| AAV1, CANINE | AAV2, EQUINE | AAV3, GOAT | AAV4, SHRIMP | AAV5, PORCINE |
| AAV1, EQUINE | AAV2, GOAT | AAV3, SHRIMP | AAV4, PORCINE | AAV5, INSECT |
| AAV1, GOAT | AAV2, SHRIMP | AAV3, PORCINE | AAV4, INSECT | AAV5, OVINE |
| AAV1, SHRIMP | AAV2, PORCINE | AAV3, INSECT | AAV4, OVINE | AAV5, B19 |
| AAV1, PORCINE | AAV2, INSECT | AAV3, OVINE | AAV4, B19 | AAV5, MVM |
| AAV1, INSECT | AAV2, BOVINE | AAV3, B19 | AAV4, MVM | AAV5, GOOSE |
| AAV1, OVINE | AAV2, B19 | AAV3, MVM | AAV4, GOOSE | AAV5, SNAKE |
| AAV1, B19 | AAV2, MVM | AAV3, GOOSE | AAV4, SNAKE | |
| AAV1, MVM | AAV2, GOOSE | AAV3, SNAKE | | |
| AAV1, GOOSE | AAV2, SNAKE | | | |
| AAV1, SNAKE | | | | |
| AAV6, AAV6 | AAV7, AAV7 | AAV8, AAV8 | AAV9, AAV9 | AAV10, AAV10 |
| AAV6, AAV7 | AAV7, AAV8 | AAV8, AAV9 | AAV9, AAV10 | AAV10, AAV11 |
| AAV6, AAV8 | AAV7, AAV9 | AAV8, AAV10 | AAV9, AAV11 | AAV10, AAV12 |
| AAV6, AAV9 | AAV7, AAV10 | AAV8, AAV11 | AAV9, AAV12 | AAV10, AAVRH8 |
| AAV6, AAV10 | AAV7, AAV11 | AAV8, AAV12 | AAV9, AAVRH8 | AAV10, AAVRH10 |
| AAV6, AAV11 | AAV7, AAV12 | AAV8, AAVRH8 | AAV9, AAVRH10 | AAV10, AAV13 |
| AAV6, AAV12 | AAV7, AAVRH8 | AAV8, AAVRH10 | AAV9, AAV13 | AAV10, AAVDJ |
| AAV6, AAVRH8 | AAV7, AAVRH10 | AAV8, AAV13 | AAV9, AAVDJ | AAV10, AAVDJ8 |
| AAV6, AAVRH10 | AAV7, AAV13 | AAV8, AAVDJ | AAV9, AAVDJ8 | AAV10, AVIAN |
| AAV6, AAV13 | AAV7, AAVDJ | AAV8, AAVDJ8 | AAV9, AVIAN | AAV10, BOVINE |
| AAV6, AAVDJ | AAV7, AAVDJ8 | AAV8, AVIAN | AAV9, BOVINE | AAV10, CANINE |
| AAV6, AAVDJ8 | AAV7, AVIAN | AAV8, BOVINE | AAV9, CANINE | AAV10, EQUINE |
| AAV6, AVIAN | AAV7, BOVINE | AAV8, CANINE | AAV9, EQUINE | AAV10, GOAT |
| AAV6, BOVINE | AAV7, CANINE | AAV8, EQUINE | AAV9, GOAT | AAV10, SHRIMP |
| AAV6, CANINE | AAV7, EQUINE | AAV8, GOAT | AAV9, SHRIMP | AAV10, PORCINE |
| AAV6, EQUINE | AAV7, GOAT | AAV8, SHRIMP | AAV9, PORCINE | AAV10, INSECT |
| AAV6, GOAT | AAV7, SHRIMP | AAV8, PORCINE | AAV9, INSECT | AAV10, OVINE |
| AAV6, SHRIMP | AAV7, PORCINE | AAV8, INSECT | AAV9, OVINE | AAV10, B19 |
| AAV6, PORCINE | AAV7, INSECT | AAV8, OVINE | AAV9, B19 | AAV10, MVM |
| AAV6, INSECT | AAV7, OVINE | AAV8, B19 | AAV9, MVM | AAV10, GOOSE |
| AAV6, OVINE | AAV7, B19 | AAV8, MVM | AAV9, GOOSE | AAV10, SNAKE |
| AAV6, B19 | AAV7, MVM | AAV8, GOOSE | AAV9, SNAKE | |
| AAV6, MVM | AAV7, GOOSE | AAV8, SNAKE | | |
| AAV6, GOOSE | AAV7, SNAKE | | | |
| AAV6, SNAKE | | | | |
| AAV11, AAV11 | AAV12, AAV12 | AAVRH8, AAVRH8 | AAVRH10, AAVRH10 | AAV13, AAV13 |
| AAV11, AAV12 | AAV12, AAVRH8 | AAVRH8, AAVRH10 | AAVRH10, AAV13 | AAV13, AAVDJ |
| AAV11, AAVRH8 | AAV12, AAVRH10 | AAVRH8, AAV13 | AAVRH10, AAVDJ | AAV13, AAVDJ8 |
| AAV11, AAVRH10 | AAV12, AAV13 | AAVRH8, AAVDJ | AAVRH10, AAVDJ8 | AAV13, AVIAN |
| AAV11, AAV13 | AAV12, AAVDJ | AAVRH8, AAVDJ8 | AAVRH10, AVIAN | AAV13, BOVINE |
| AAV11, AAVDJ | AAV12, AAVDJ8 | AAVRH8, AVIAN | AAVRH10, BOVINE | AAV13, CANINE |
| AAV11, AAVDJ8 | AAV12, AVIAN | AAVRH8, BOVINE | AAVRH10, CANINE | AAV13, EQUINE |
| AAV11, AVIAN | AAV12, BOVINE | AAVRH8, CANINE | AAVRH10, EQUINE | AAV13, GOAT |
| AAV11, BOVINE | AAV12, CANINE | AAVRH8, EQUINE | AAVRH10, GOAT | AAV13, SHRIMP |
| AAV11, CANINE | AAV12, EQUINE | AAVRH8, GOAT | AAVRH10, SHRIMP | AAV13, PORCINE |
| AAV11, EQUINE | AAV12, GOAT | AAVRH8, SHRIMP | AAVRH10, PORCINE | AAV13, INSECT |
| AAV11, GOAT | AAV12, SHRIMP | AAVRH8, PORCINE | AAVRH10, INSECT | AAV13, OVINE |
| AAV11, SHRIMP | AAV12, PORCINE | AAVRH8, INSECT | AAVRH10, OVINE | AAV13, B19 |
| AAV11, PORCINE | AAV12, INSECT | AAVRH8, OVINE | AAVRH10, B19 | AAV13, MVM |
| AAV11, INSECT | AAV12, OVINE | AAVRH8, B19 | AAVRH10, MVM | AAV13, GOOSE |
| AAV11, OVINE | AAV12, B19 | AAVRH8, MVM | AAVRH10, GOOSE | AAV13, SNAKE |
| AAV11, B19 | AAV12, MVM | AAVRH8, GOOSE | AAVRH10, SNAKE | |
| AAV11, MVM | AAV12, GOOSE | AAVRH8, SNAKE | | |
| AAV11, GOOSE | AAV12, SNAKE | | | |
| AAV11, SNAKE | | | | |
| AAVDJ, AAVDJ | AAVDJ8, AVVDJ8 | AVIAN, AVIAN | BOVINE, BOVINE | CANINE, CANINE |
| AAVDJ, AAVDJ8 | AAVDJ8, AVIAN | AVIAN, BOVINE | BOVINE, CANINE | CANINE, EQUINE |
| AAVDJ, AVIAN | AAVDJ8, BOVINE | AVIAN, CANINE | BOVINE, EQUINE | CANINE, GOAT |
| AAVDJ, BOVINE | AAVDJ8, CANINE | AVIAN, EQUINE | BOVINE, GOAT | CANINE, SHRIMP |
| AAVDJ, CANINE | AAVDJ8, EQUINE | AVIAN, GOAT | BOVINE, SHRIMP | CANINE, PORCINE |
| AAVDJ, EQUINE | AAVDJ8, GOAT | AVIAN, SHRIMP | BOVINE, PORCINE | CANINE, INSECT |
| AAVDJ, GOAT | AAVDJ8, SHRIMP | AVIAN, PORCINE | BOVINE, INSECT | CANINE, OVINE |
| AAVDJ, SHRIMP | AAVDJ8, PORCINE | AVIAN, INSECT | BOVINE, OVINE | CANINE, B19 |
| AAVDJ, PORCINE | AAVDJ8, INSECT | AVIAN, OVINE | BOVINE, B19 | CANINE, MVM |
| AAVDJ, INSECT | AAVDJ8, OVINE | AVIAN, B19 | BOVINE, MVM | CANINE, GOOSE |
| AAVDJ, OVINE | AAVDJ8, B19 | AVIAN, MVM | BOVINE, GOOSE | CANINE, SNAKE |
| AAVDJ, B19 | AAVDJ8, MVM | AVIAN, GOOSE | BOVINE, SNAKE | |
| AAVDJ, MVM | AAVDJ8, GOOSE | AVIAN, SNAKE | | |
| AAVDJ, GOOSE | AAVDJ8, SNAKE | | | |
| AAVDJ, SNAKE | | | | |
| EQUINE, EQUINE | GOAT, GOAT | SHRIMP, SHRIMP | PORCINE, PORCINE | INSECT, INSECT |
| EQUINE, GOAT | GOAT, SHRIMP | SHRIMP, PORCINE | PORCINE, INSECT | INSECT, OVINE |
| EQUINE, SHRIMP | GOAT, PORCINE | SHRIMP, INSECT | PORCINE, OVINE | INSECT, B19 |
| EQUINE, PORCINE | GOAT, INSECT | SHRIMP, OVINE | PORCINE, B19 | INSECT, MVM |
| EQUINE, INSECT | GOAT, OVINE | SHRIMP, B19 | PORCINE, MVM | INSECT, GOOSE |
| EQUINE, OVINE | GOAT, B19 | SHRIMP, MVM | PORCINE, GOOSE | INSECT, SNAKE |
| EQUINE, B19 | GOAT, MVM | SHRIMP, GOOSE | PORCINE, SNAKE | |
| EQUINE, MVM | GOAT, GOOSE | SHRIMP, SNAKE | | |
| EQUINE, GOOSE | GOAT, SNAKE | | | |
| EQUINE, SNAKE | | | | |
| OVINE, OVINE | B19, B19 | MVM, MVM | GOOSE, GOOSE | SNAKE, SNAKE |
| OVINE, B19 | B19, MVM | MVM, GOOSE | GOOSE, SNAKE | |
| OVINE, MVM | B19, GOOSE | MVM, SNAKE | | |
| OVINE, GOOSE | B19, SNAKE | | | |
| OVINE, SNAKE | | | | |

[0251] By way of example only, Table 3 shows the sequences of exemplary WT-ITRs from some different AAV serotypes.

TABLE 3

| AAV | 5′ WT-ITR | 3′ WT-ITR |
|---|---|---|
| serotype | (LEFT) | (RIGHT) |
| AAV1 | 5′- | 5′- |
| | TTGCCCACTCCCTCT | TTACCCTAGTGATGG |
| | CTGCGCGCTCGCTCG | AGTTGCCCACTCCCT |
| | CTCGGTGGGGCCTGC | CTCTGCGCGCGTCGC |
| | GGACCAAAGGTCCGC | TCGCTCGGTGGGGCC |
| | AGACGGCAGAGGTCT | GGCAGAGGAGACCTC |
| | CCTCTGCCGGCCCCA | TGCCGTCTGCGGACC |
| | CCGAGCGAGCGACGC | TTTGGTCCGCAGGCC |
| | GCGCAGAGAGGGAGT | CCACCGAGCGAGCGA |
| | GGGCAACTCCATCAC | GCGCGCAGAGAGGGA |
| | TAGGGTAA-3′ | GTGGGCAA-3′ |
| | (SEQ ID NO: 5) | (SEQ ID NO: 10) |
| AAV2 | CCTGCAGGCAGCTGC | AGGAACCCCTAGTGA |
| | GCGCTCGCTCGCTCA | TGGAGTTGGCCACTC |
| | CTGAGGCCGCCCGGG | CCTCTCTGCGCGCTC |
| | CAAAGCCCGGGCGTC | GCTCGCTCACTGAGG |
| | GGGCGACCTTTGGTC | CCGGGCGACCAAAGG |
| | GCCCGGCCTCAGTGA | TCGCCCGACGCCCGG |
| | GCGAGCGAGCGCGCA | GCTTTGCCCGGGCGG |
| | GAGAGGGAGTGGCCA | CCTCAGTGAGCGAGC |
| | ACTCCATCACTAGGG | GAGCGCGCAGCTGCC |
| | GTTCCT | TGCAGG |
| | (SEQ ID NO: 2) | (SEQ ID NO: 1) |
| AAV3 | 5′- | 5′- |
| | TTGGCCACTCCCTCT | ATACCTCTAGTGATG |
| | ATGCGCACTCGCTCG | GAGTTGGCCACTCCC |
| | CTCGGTGGGGCCTGG | TCTATGCGCACTCGC |
| | CGACCAAAGGTCGCC | TCGCTCGGTGGGGCC |
| | AGACGGACGTGGGTT | GGACGTGGAAACCCA |
| | TCCACGTCCGGCCCC | CGTCCGTCTGGCGAC |
| | ACCGAGCGAGCGAGT | CTTTGGTCGCCAGGC |
| | GCGCATAGAGGGAGT | CCCACCGAGCGAGCG |
| | GGCCAACTCCATCAC | AGTGCGCATAGAGGG |
| | TAGAGGTAT-3′ | AGTGGCCAA-3′ |
| | (SEQ ID NO: 6) | (SEQ ID NO: 11) |
| AAV4 | 5′- | 5′- |
| | TTGGCCACTCCCTCT | AGTTGGCCACATTAG |
| | ATGCGCGCTCGCTCA | CTATGCGCGCTCGCT |
| | CTCACTCGGCCCTGG | CACTCACTCGGCCCT |
| | AGACCAAAGGTCTCC | GGAGACCAAAGGTCT |
| | AGACTGCCGGCCTCT | CCAGACTGCCGGCCT |
| | GGCCGGCAGGGCCGA | CTGGCCGGCAGGGCC |
| | GTGAGTGAGCGAGCG | GAGTGAGTGAGCGAG |
| | CGCATAGAGGGAGTG | CGCGCATAGAGGGAG |
| | GCCAACT-3′ | TGGCCAA-3′ |
| | (SEQ ID NO: 7) | (SEQ ID NO: 12) |
| AAV5 | 5′- | 5′- |
| | TCCCCCCTGTCGCGT | CTTACAAAACCCCCT |
| | TCGCTCGCTCGCTGG | TGCTTGAGAGTGTGG |
| | CTCGTTTGGGGGGGC | CACTCTCCCCCCTGT |
| | GACGGCCAGAGGGCC | CGCGTTCGCTCGCTC |
| | GTCGTCTGGCAGCTC | GCTGGCTCGTTTGGG |
| | TTTGAGCTGCCACCC | GGGGTGGCAGCTCAA |
| | CCCCAAACGAGCCAG | AGAGCTGCCAGACGA |
| | CGAGCGAGCGAACGC | CGGCCCTCTGGCCGT |
| | GACAGGGGGGAGAGT | CGCCCCCCCAAACGA |
| | GCCACACTCTCAAGC | GCCAGCGAGCGAGCG |
| | AAGGGGGTTTTGTAA | AACGCGACAGGGGGG |
| | G-3′ | A-3′ |
| | (SEQ ID NO: 8) | (SEQ ID NO: 13) |
| AAV6 | 5′- | 5′- |
| | TTGCCCACTCCCTCT | ATACCCCTAGTGATG |
| | AATGCGCGCTCGCTC | GAGTTGCCCACTCCC |
| | GCTCGGTGGGGCCTG | TCTATGCGCGCTCGC |
| | CGGACCAAAGGTCCG | TCGCTCGGTGGGGCC |
| | CAGACGGCAGAGGTC | GGCAGAGGAGACCTC |
| | TCCTCTGCCGGCCCC | TGCCGTCTGCGGACC |
| | ACCGAGCGAGCGAGC | TTTGGTCCGCAGGCC |
| | GCGCATAGAGGGAGT | CCACCGAGCGAGCGA |
| | GGGCAACTCCATCAC | GCGCGCATTAGAGGG |
| | TAGGGGTAT-3′ | AGTGGGCAA |
| | (SEQ ID NO: 9) | (SEQ ID NO: 14) |

[0252] In some embodiments, the nucleic acid sequence of the WT-ITR sequence can be modified (e.g., by modifying 1, 2, 3, 4 or 5, or more nucleotides or any range therein), whereby the modification is a substitution for a complementary nucleotide, e.g., G for a C, and vice versa, and T for an A, and vice versa.

[0253] In certain embodiments of the present disclosure, the ceDNA vector for expression of PAH protein does not have a WT-ITR consisting of the nucleic acid sequence selected from any of: SEQ ID NOs: 1, 2, 5-14. In alternative embodiments of the present disclosure, if a ceDNA vector has a WT-ITR comprising the nucleic acid sequence selected from any of: SEQ ID NOs: 1, 2, 5-14, then the flanking ITR is also WT and the ceDNA vector comprises a regulatory switch, e.g., as disclosed herein and in International Patent Application No. PCT/US18/49996 (e.g., see Table 11 of PCT/US 18/49996, incorporated by reference in its entirety herein). In some embodiments, the ceDNA vector for expression of PAH protein comprises a regulatory switch as disclosed herein and a WT-ITR selected having the nucleic acid sequence selected from any of the group consisting of: SEQ ID NO: 1, 2, 5-14.

[0254] The ceDNA vector for expression of PAH protein as described herein can include WT-ITR structures that retains an operable RBE, trs and RBE′ portion. FIG. 1A and FIG. 1B, using wild-type ITRs for exemplary purposes, show one possible mechanism for the operation of a trs site within a wild type ITR structure portion of a ceDNA vector. In some embodiments, the ceDNA vector for expression of PAH protein contains one or more functional WT-ITR polynucleotide sequences that comprise a Rep-binding site (RBS; 5′-GCGCGCTCGCTCGCTC-3′ (SEQ ID NO: 60) for AAV2) and a terminal resolution site (TRS; 5′-AGTT (SEQ ID NO: 62)). In some embodiments, at least one WT-ITR is functional. In alternative embodiments, where a ceDNA vector for expression of PAH protein comprises two WT-ITRs that are substantially symmetrical to each other, at least one WT-ITR is functional and at least one WT-ITR is non-functional.

B. Modified ITRs (Mod-ITRs) in General for ceDNA Vectors Comprising Asymmetric ITR Pairs or Symmetric ITR Pairs

[0255] As discussed herein, a ceDNA vector for expression of PAH protein can comprise a symmetrical ITR pair or an asymmetrical ITR pair. In both instances, one or both of the ITRs can be modified ITRs—the difference being that in the first instance (i.e., symmetric mod-ITRs), the mod-ITRs have the same three-dimensional spatial organization (i.e., have the same A-A′, C-C′ and B-B′ arm configurations), whereas in the second instance (i.e., asymmetric mod-ITRs), the mod-ITRs have a different three-dimensional spatial organization (i.e., have a different configuration of A-A′, C-C′ and B-B′ arms).

[0256] In some embodiments, a modified ITR is an ITRs that is modified by deletion, insertion, and/or substitution as compared to a wild-type ITR sequence (e.g., AAV ITR). In some embodiments, at least one of the ITRs in the ceDNA vector comprises a functional Rep binding site (RBS; e.g., 5′-GCGCGCTCGCTCGCTC-3′ for AAV2, SEQ ID NO: 60) and a functional terminal resolution site (TRS; e.g., 5′-AGTT-3′, SEQ ID NO: 62.) In one embodiment, at least one of the ITRs is a non-functional ITR. In one embodiment, the different or modified ITRs are not each wild type ITRs from different serotypes.

[0257] Specific alterations and mutations in the ITRs are described in detail herein, but in the context of ITRs, “altered” or “mutated” or “modified”, it indicates that nucleotides have been inserted, deleted, and/or substituted relative to the wild-type, reference, or original ITR sequence. The altered or mutated ITR can be an engineered ITR. As used herein, “engineered” refers to the aspect of having been manipulated by the hand of man. For example, a polypeptide is considered to be “engineered” when at least one aspect of the polypeptide, e.g., its sequence, has been manipulated by the hand of man to differ from the aspect as it exists in nature.

[0258] In some embodiments, a mod-ITR may be synthetic. In one embodiment, a synthetic ITR is based on ITR sequences from more than one AAV serotype. In another embodiment, a synthetic ITR includes no AAV-based sequence. In yet another embodiment, a synthetic ITR preserves the ITR structure described above although having only some or no AAV-sourced sequence. In some aspects, a synthetic ITR may interact preferentially with a wild type Rep or a Rep of a specific serotype, or in some instances will not be recognized by a wild-type Rep and be recognized only by a mutated Rep.

[0259] The skilled artisan can determine the corresponding sequence in other serotypes by known means. For example, determining if the change is in the A, A′, B, B′, C, C′ or D region and determine the corresponding region in another serotype. One can use BLAST® (Basic Local Alignment Search Tool) or other homology alignment programs at default status to determine the corresponding sequence. The disclosure further provides populations and pluralities of ceDNA vectors comprising mod-ITRs from a combination of different AAV serotypes—that is, one mod-ITR can be from one AAV serotype and the other mod-ITR can be from a different serotype. Without wishing to be bound by theory, in one embodiment one ITR can be from or based on an AAV2 ITR sequence and the other ITR of the ceDNA vector can be from or be based on any one or more ITR sequence of AAV serotype 1 (AAV1), AAV serotype 4 (AAV4), AAV serotype 5 (AAV5), AAV serotype 6 (AAV6), AAV serotype 7 (AAV7), AAV serotype 8 (AAV8), AAV serotype 9 (AAV9), AAV serotype 10 (AAV10), AAV serotype 11 (AAV11), or AAV serotype 12 (AAV12).

[0260] Any parvovirus ITR can be used as an ITR or as a base ITR for modification. Preferably, the parvovirus is a dependovirus. More preferably AAV. The serotype chosen can be based upon the tissue tropism of the serotype. AAV2 has a broad tissue tropism, AAV1 preferentially targets to neuronal and skeletal muscle, and AAV5 preferentially targets neuronal, retinal pigmented epithelia, and photoreceptors. AAV6 preferentially targets skeletal muscle and lung. AAV8 preferentially targets liver, skeletal muscle, heart, and pancreatic tissues. AAV9 preferentially targets liver, skeletal and lung tissue. In one embodiment, the modified ITR is based on an AAV2 ITR.

[0261] More specifically, the ability of a structural element to functionally interact with a particular large Rep protein can be altered by modifying the structural element. For example, the nucleic acid sequence of the structural element can be modified as compared to the wild-type sequence of the ITR. In one embodiment, the structural element (e.g., A arm, A′ arm, B arm, B′ arm, C arm, C′ arm, D arm, RBE, RBE′, and trs) of an ITR can be removed and replaced with a wild-type structural element from a different parvovirus. For example, the replacement structure can be from AAV1, AAV2, AAV3, AAV4, AAV5, AAV6, AAV7, AAV8, AAV9, AAV10, AAV11, AAV12, AAV13, snake parvovirus (e.g., royal python parvovirus), bovine parvovirus, goat parvovirus, avian parvovirus, canine parvovirus, equine parvovirus, shrimp parvovirus, porcine parvovirus, or insect AAV. For example, the ITR can be an AAV2 ITR and the A or A′ arm or RBE can be replaced with a structural element from AAV5. In another example, the ITR can be an AAV5 ITR and the C or C′ arms, the RBE, and the trs can be replaced with a structural element from AAV2. In another example, the AAV ITR can be an AAV5 ITR with the B and B′ arms replaced with the AAV2 ITR B and B′ arms.

[0262] By way of example only, Table 4 indicates exemplary modifications of at least one nucleotide (e.g., a deletion, insertion and/or substitution) in regions of a modified ITR, where X is indicative of a modification of at least one nucleic acid (e.g., a deletion, insertion and/or substitution) in that section relative to the corresponding wild-type ITR. In some embodiments, any modification of at least one nucleotide (e.g., a deletion, insertion and/or substitution) in any of the regions of C and/or C′ and/or B and/or B′ retains three sequential T nucleotides (i.e., TTT) in at least one terminal loop. For example, if the modification results in any of: a single arm ITR (e.g., single C-C′ arm, or a single B-B′ arm), or a modified C-B′ arm or C′-B arm, or a two arm ITR with at least one truncated arm (e.g., a truncated C-C′ arm and/or truncated B-B′ arm), at least the single arm, or at least one of the arms of a two arm ITR (where one arm can be truncated) retains three sequential T nucleotides (i.e., TTT) in at least one terminal loop. In some embodiments, a truncated C-C′ arm and/or a truncated B-B′ arm has three sequential T nucleotides (i.e., TTT) in the terminal loop.

TABLE 4
Exemplary combinations of modifications of at least one nucleotide (e.g.,
a deletion, insertion and/or substitution) to different B-B' and C-C'
regions or arms of ITRs (X indicates a nucleotide modification, e.g.,
addition, deletion or substitution of at least one nucleotide in the region).

| B region | B' region | C region | C' region |
|---|---|---|---|
| X | | | |
| | X | | |
| X | X | | |
| | | X | |
| | | | X |
| | | X | X |
| X | | X | |
| X | | | X |
| | X | X | |
| | X | | X |
| X | X | X | |
| X | X | | X |
| X | | X | X |
| | X | X | X |
| X | X | X | X |

[0263] In some embodiments, mod-ITR for use in a ceDNA vector for expression of PAH protein comprises an asymmetric ITR pair, or a symmetric mod-ITR pair as disclosed herein, can comprise any one of the combinations of modifications shown in Table 4, and also a modification of at least one nucleotide in any one or more of the regions selected from: between A′ and C, between C and C′, between C′ and B, between B and B′ and between B′ and A. In some embodiments, any modification of at least one nucleotide (e.g., a deletion, insertion and/or substitution) in the C or C′ or B or B′ regions, still preserves the terminal loop of the stem-loop. In some embodiments, any modification of at least one nucleotide (e.g., a deletion, insertion and/or substitution) between C and C′ and/or B and B′ retains three sequential T nucleotides (i.e., TTT) in at least one terminal loop. In alternative embodiments, any modification of at least one nucleotide (e.g., a deletion, insertion and/or substitution) between C and C′ and/or B and B′ retains three sequential A nucleotides (i.e., AAA) in at least one terminal loop. In some embodiments, a modified ITR for use herein can comprise any one of the combinations of modifications shown in Table 4, and also a modification of at least one nucleotide (e.g., a deletion, insertion and/or substitution) in any one or more of the regions selected from: A′, A and/or D. For example, in some embodiments, a modified ITR for use herein can comprise any one of the combinations of modifications shown in Table 4, and also a modification of at least one nucleotide (e.g., a deletion, insertion and/or substitution) in the A region. In some embodiments, a modified ITR for use herein can comprise any one of the combinations of modifications shown in Table 4, and also a modification of at least one nucleotide (e.g., a deletion, insertion and/or substitution) in the A′ region. In some embodiments, a modified ITR for use herein can comprise any one of the combinations of modifications shown in Table 4, and also a modification of at least one nucleotide (e.g., a deletion, insertion and/or substitution) in the A and/or A′ region. In some embodiments, a modified ITR for use herein can comprise any one of the combinations of modifications shown in Table 4, and also a modification of at least one nucleotide (e.g., a deletion, insertion and/or substitution) in the D region.

[0264] In one embodiment, the nucleotide sequence of the structural element can be modified (e.g., by modifying 1, 2, 3, 4, 5, 6, 7, 8, 9, 10, 11, 12, 13, 14, 15, 16, 17, 18, 19, or 20 or more nucleotides or any range therein) to produce a modified structural element. In one embodiment, the specific modifications to the ITRs are exemplified herein (e.g., SEQ ID NOS: 3, 4, 15-47, 101-116 or 165-187, or shown in FIG. 7A-7B of PCT/US2018/064242, filed on Dec. 6, 2018 (e.g., SEQ ID NOS: 97-98, 101-103, 105-108, 111-112, 117-134, 545-54 in PCT/US2018/064242). In some embodiments, an ITR can be modified (e.g., by modifying 1, 2, 3, 4, 5, 6, 7, 8, 9, 10, 11, 12, 13, 14, 15, 16, 17, 18, 19, or 20 or more nucleotides or any range therein). In other embodiments, the ITR can have at least 80%, at least 85%, at least 90%, at least 95%, at least 96%, at least 97%, at least 98%, at least 99%, or more sequence identity with one of the modified ITRs of SEQ ID NOS: 3, 4, 15-47, 101-116 or 165-187, or the RBE-containing section of the A-A′ arm and C-C′ and B-B′ arms of SEQ ID NO: 3, 4, 15-47, 101-116 or 165-187, or shown in Tables 2-9 (i.e., SEQ ID NO: 110-112, 115-190, 200-468) of International Patent Application No. PCT/US18/49996, which is incorporated herein in its entirety by reference.

[0265] In some embodiments, a modified ITR can for example, comprise removal or deletion of all of a particular arm, e.g., all or part of the A-A′ arm, or all or part of the B-B′ arm or all or part of the C-C′ arm, or alternatively, the removal of 1, 2, 3, 4, 5, 6, 7, 8, 9 or more base pairs forming the stem of the loop so long as the final loop capping the stem (e.g., single arm) is still present (e.g., see ITR-21 in FIG. 7A of International Patent Application No. PCT/US2018/064242, filed Dec. 6, 2018, incorporated by reference in its entirety herein). In some embodiments, a modified ITR can comprise the removal of 1, 2, 3, 4, 5, 6, 7, 8, 9 or more base pairs from the B-B′ arm. In some embodiments, a modified ITR can comprise the removal of 1, 2, 3, 4, 5, 6, 7, 8, 9 or more base pairs from the C-C′ arm (see, e.g., ITR-1 in FIG. 3B, or ITR-45 in FIG. 7A of International Patent Application No. PCT/US2018/064242, filed Dec. 6, 2018, incorporated by reference in its entirety herein). In some embodiments, a modified ITR can comprise the removal of 1, 2, 3, 4, 5, 6, 7, 8, 9 or more base pairs from the C-C′ arm and the removal of 1, 2, 3, 4, 5, 6, 7, 8, 9 or more base pairs from the B-B′ arm. Any combination of removal of base pairs is envisioned, for example, 6 base pairs can be removed in the C-C′ arm and 2 base pairs in the B-B′ arm. As an illustrative example, FIG. 3B shows an exemplary modified ITR with at least 7 base pairs deleted from each of the C portion and the C′ portion, a substitution of a nucleotide in the loop between C and C′ region, and at least one base pair deletion from each of the B region and B′ regions such that the modified ITR comprises two arms where at least one arm (e.g., C-C′) is truncated. In some embodiments, the modified ITR also comprises at least one base pair deletion from each of the B region and B′ regions, such that the B-B′ arm is also truncated relative to WT ITR.

[0266] In some embodiments, a modified ITR can have between 1 and 50 (e.g. 1, 2, 3, 4, 5, 6, 7, 8, 9, 10, 11, 12, 13, 14, 15, 16, 17, 18, 19, 20, 21, 22, 23, 24, 25, 26, 27, 28, 29, 30, 31, 32, 33, 34, 35, 36, 37, 38, 39, 40, 41, 42, 43, 44, 45, 46, 47, 48, 49, or 50) nucleotide deletions relative to a full-length wild-type ITR sequence. In some embodiments, a modified ITR can have between 1 and 30 nucleotide deletions relative to a full-length WT ITR sequence. In some embodiments, a modified ITR has between 2 and 20 nucleotide deletions relative to a full-length wild-type ITR sequence.

[0267] In some embodiments, a modified ITR does not contain any nucleotide deletions in the RBE-containing portion of the A or A′ regions, so as not to interfere with DNA replication (e.g. binding to an RBE by Rep protein, or nicking at a terminal resolution site). In some embodiments, a modified ITR encompassed for use herein has one or more deletions in the B, B′, C, and/or C region as described herein.

[0268] In some embodiments, a ceDNA vector for expression of PAH protein comprising a symmetric ITR pair or asymmetric ITR pair comprises a regulatory switch as disclosed herein and at least one modified ITR selected having the nucleotide sequence selected from any of the group consisting of: SEQ ID NO: 3, 4, 15-47, 101-116 or 165-187.

[0269] In another embodiment, the structure of the structural element can be modified. For example, the structural element a change in the height of the stem and/or the number of nucleotides in the loop. For example, the height of the stem can be about 2, 3, 4, 5, 6, 7, 8, or 9 nucleotides or more or any range therein. In one embodiment, the stem height can be about 5 nucleotides to about 9 nucleotides and functionally interacts with Rep. In another embodiment, the stem height can be about 7 nucleotides and functionally interacts with Rep. In another example, the loop can have 3, 4, 5, 6, 7, 8, 9, or 10 nucleotides or more or any range therein.

[0270] In another embodiment, the number of GAGY binding sites or GAGY-related binding sites within the RBE or extended RBE can be increased or decreased. In one example, the RBE or extended RBE, can comprise 1, 2, 3, 4, 5, or 6 or more GAGY binding sites or any range therein. Each GAGY binding site can independently be an exact GAGY sequence or a sequence similar to GAGY as long as the sequence is sufficient to bind a Rep protein.

[0271] In another embodiment, the spacing between two elements (such as but not limited to the RBE and a hairpin) can be altered (e.g., increased or decreased) to alter functional interaction with a large Rep protein. For example, the spacing can be about 1, 2, 3, 4, 5, 6, 7, 8, 9, 10, 11, 12, 13, 14, 15, 16, 17, 18, 19, 20, or 21 nucleotides or more or any range therein.

[0272] The ceDNA vector for expression of PAH protein as described herein can include an ITR structure that is modified with respect to the wild type AAV2 ITR structure disclosed herein, but still retains an operable RBE, trs and RBE′ portion. In some embodiments, the ceDNA vector for expression of PAH protein contains one or more functional ITR polynucleotide sequences that comprise a Rep-binding site (RBS; 5′-GCGCGCTCGCTCGCTC-3′ (SEQ ID NO: 60) for AAV2) and a terminal resolution site (TRS; 5′-AGTT (SEQ ID NO: 62)). In some embodiments, at least one ITR (wt or modified ITR) is functional. In alternative embodiments, where a ceDNA vector for expression of PAH protein comprises two modified ITRs that are different or asymmetrical to each other, at least one modified ITR is functional and at least one modified ITR is non-functional.

[0273] In some embodiments, the modified ITR (e.g., the left or right ITR) of a ceDNA vector for expression of PAH protein as described herein has modifications within the loop arm, the truncated arm, or the spacer. Exemplary sequences of ITRs having modifications within the loop arm, the truncated arm, or the spacer are listed in Table 2 (i.e., SEQ ID NOs: 135-190, 200-233); Table 3 (e.g., SEQ ID NOs: 234-263); Table 4 (e.g., SEQ ID NOs: 264-293); Table 5 (e.g., SEQ ID NOs: 294-318 herein); Table 6 (e.g., SEQ ID NOs: 319-468; and Tables 7-9 (e.g., SEQ ID NOs: 101-110, 111-112, 115-134) or Table 10A or 10B (e.g., SEQ ID NOs: 9, 100, 469-483, 484-499) of International application PCT/US18/49996, which is incorporated herein in its entirety by reference.

[0274] In some embodiments, the modified ITR for use in a ceDNA vector for expression of PAH protein comprising an asymmetric ITR pair, or symmetric mod-ITR pair is selected from any or a combination of those shown in Tables 2, 3, 4, 5, 6, 7, 8, 9 and 10A-10B of International application PCT/US18/49996 which is incorporated herein in its entirety by reference.

[0275] Additional exemplary modified ITRs for use in a ceDNA vector for expression of PAH protein comprising an asymmetric ITR pair, or symmetric mod-ITR pair in each of the above classes are provided in Tables 5A and 5B. The predicted secondary structure of the Right modified ITRs in Table 5A are shown in FIG. 7A of International Application PCT/US2018/064242, filed Dec. 6, 2018, and the predicted secondary structure of the Left modified ITRs in Table 5B are shown in FIG. 7B of International Application PCT/US2018/064242, filed Dec. 6, 2018, which is incorporated herein in its entirety by reference.

[0276] Table 5A and Table 5B show exemplary right and left modified ITRs.

TABLE 5A
Exemplary modified right ITRs. These exemplary modified right ITRs can
comprise the RBE of GCGCGCTCGCTCGCTC-3′ (SEQ ID NO: 60),
spacer of ACTGAGGC (SEQ ID NO: 69), the spacer complement GCCTCAGT
(SEQ ID NO: 70) and RBE′ (i.e., complement to RBE) of
GAGCGAGCGAGCGCGC (SEQ ID NO: 71).
Exemplary Right modified ITRs

| ITR | | SEQ ID |
|---|---|---|
| Construct | Sequence | NO: |
| ITR-18 | AGGAACCCCTAGTGATGGAGTTGGCCACTCCCTCTCTGCGCGCTCG | 15 |
| Right | CTCGCTCACTGAGGCGCACGCCCGGGTTTCCCGGGCGGCCTCAGTG | |
| | AGCGAGCGAGCGCGCAGCTGCCTGCAGG | |
| ITR-19 | AGGAACCCCTAGTGATGGAGTTGGCCACTCCCTCTCTGCGCGCTCG | 16 |
| Right | CTCGCTCACTGAGGCCGACGCCCGGGCTTTGCCCGGGCGGCCTCA | |
| | GTGAGCGAGCGAGCGCGCAGCTGCCTGCAGG | |
| ITR-20 | AGGAACCCCTAGTGATGGAGTTGGCCACTCCCTCTCTGCGCGCTCG | 17 |
| Right | CTCGCTCACTGAGGCCGGGCGACCAAAGGTCGCCCGACGCCCGGG | |
| | CGCCTCAGTGAGCGAGCGAGCGCGCAGCTGCCTGCAGG | |
| ITR-21 | AGGAACCCCTAGTGATGGAGTTGGCCACTCCCTCTCTGCGCGCTCG | 18 |
| Right | CTCGCTCACTGAGGCTTTGCCTCAGTGAGCGAGCGAGCGCGCAGC | |
| | TGCCTGCAGG | |
| ITR-22 | AGGAACCCCTAGTGATGGAGTTGGCCACTCCCTCTCTGCGCGCTCG | 19 |
| Right | CTCGCTCACTGAGGCCGGGCGACAAAGTCGCCCGACGCCCGGGCT | |
| | TTGCCCGGGCGGCCTCAGTGAGCGAGCGAGCGCGCAGCTGCCTGC | |
| | AGG | |
| ITR-23 | AGGAACCCCTAGTGATGGAGTTGGCCACTCCCTCTCTGCGCGCTCG | 20 |
| Right | CTCGCTCACTGAGGCCGGGCGAAAATCGCCCGACGCCCGGGCTTT | |
| | GCCCGGGCGGCCTCAGTGAGCGAGCGAGCGCGCAGCTGCCTGCAG | |
| | G | |
| ITR-24 | AGGAACCCCTAGTGATGGAGTTGGCCACTCCCTCTCTGCGCGCTCG | 21 |
| Right | CTCGCTCACTGAGGCCGGGCGAAACGCCCGACGCCCGGGCTTTGC | |
| | CCGGGCGGCCTCAGTGAGCGAGCGAGCGCGCAGCTGCCTGCAGG | |
| ITR-25 | AGGAACCCCTAGTGATGGAGTTGGCCACTCCCTCTCTGCGCGCTCG | 22 |
| Right | CTCGCTCACTGAGGCCGGGCAAAGCCCGACGCCCGGGCTTTGCCC | |
| | GGGCGGCCTCAGTGAGCGAGCGAGCGCGCAGCTGCCTGCAGG | |
| ITR-26 | AGGAACCCCTAGTGATGGAGTTGGCCACTCCCTCTCTGCGCGCTCG | 23 |
| Right | CTCGCTCACTGAGGCCGGGCGACCAAAGGTCGCCCGACGCCCGGG | |
| | TTTCCCGGGCGGCCTCAGTGAGCGAGCGAGCGCGCAGCTGCCTGC | |
| | AGG | |
| ITR-27 | AGGAACCCCTAGTGATGGAGTTGGCCACTCCCTCTCTGCGCGCTCG | 24 |
| Right | CTCGCTCACTGAGGCCGGGCGACCAAAGGTCGCCCGACGCCCGGT | |
| | TTCCGGGCGGCCTCAGTGAGCGAGCGAGCGCGCAGCTGCCTGCAG | |
| | G | |
| ITR-28 | AGGAACCCCTAGTGATGGAGTTGGCCACTCCCTCTCTGCGCGCTCG | 25 |
| Right | CTCGCTCACTGAGGCCGGGCGACCAAAGGTCGCCCGACGCCCGTT | |
| | TCGGGCGGCCTCAGTGAGCGAGCGAGCGCGCAGCTGCCTGCAGG | |
| ITR-29 | AGGAACCCCTAGTGATGGAGTTGGCCACTCCCTCTCTGCGCGCTCG | 26 |
| Right | CTCGCTCACTGAGGCCGGGCGACCAAAGGTCGCCCGACGCCCTTT | |
| | GGGCGGCCTCAGTGAGCGAGCGAGCGCGCAGCTGCCTGCAGG | |
| ITR-30 | AGGAACCCCTAGTGATGGAGTTGGCCACTCCCTCTCTGCGCGCTCG | 27 |
| Right | CTCGCTCACTGAGGCCGGGCGACCAAAGGTCGCCCGACGCCTTTG | |
| | GCGGCCTCAGTGAGCGAGCGAGCGCGCAGCTGCCTGCAGG | |
| ITR-31 | AGGAACCCCTAGTGATGGAGTTGGCCACTCCCTCTCTGCGCGCTCG | 28 |
| Right | CTCGCTCACTGAGGCCGGGCGACCAAAGGTCGCCCGACGCTTTGC | |
| | GGCCTCAGTGAGCGAGCGAGCGCGCAGCTGCCTGCAGG | |
| ITR-32 | AGGAACCCCTAGTGATGGAGTTGGCCACTCCCTCTCTGCGCGCTCG | 29 |
| Right | CTCGCTCACTGAGGCCGGGCGACCAAAGGTCGCCCGACGTTTCGG | |
| | CCTCAGTGAGCGAGCGAGCGCGCAGCTGCCTGCAGG | |
| ITR-49 | AGGAACCCCTAGTGATGGAGTTGGCCACTCCCTCTCTGCGCGCTCG | 30 |
| Right | CTCGCTCACTGAGGCCGGGCGACCAAAGGTCGCCCGACGGCCTCA | |
| | GTGAGCGAGCGAGCGCGCAGCTGCCTGCAGG | |
| ITR-50 | AGGAACCCCTAGTGATGGAGTTGGCCACTCCCTCTCTGCGCGCTCG | 31 |
| right | CTCGCTCACTGAGGCCGGGCGACCAAAGGTCGCCCGACGCCCGGG | |
| | CGGCCTCAGTGAGCGAGCGAGCGCGCAGCTGCCTGCAGG | |

TABLE 5B
Exemplary modified left ITRs. These exemplary modified left ITRs
can comprise the RBE of GCGCGCTCGCTCGCTC-3′ (SEQ ID NO: 60),
spacer of ACTGAGGC (SEQ ID NO: 69), the spacer complement
GCCTCAGT (SEQ ID NO: 70) and RBE complement (RBE′) of
GAGCGAGCGAGCGCGC (SEQ ID NO: 71).
Exemplary modified left ITRs

| | | |
|---|---|---|
| ITR-33 | CCTGCAGGCAGCTGCGCGCTCGCTCGCTCACTGAGGCCGCCCGGG | 32 |
| Left | AAACCCGGGCGTGCGCCTCAGTGAGCGAGCGAGCGCGCAGAGAG | |
| | GGAGTGGCCAACTCCATCACTAGGGGTTCCT | |
| ITR-34 | CCTGCAGGCAGCTGCGCGCTCGCTCGCTCACTGAGGCCGTCGGGC | 33 |
| Left | GACCTTTGGTCGCCCGGCCTCAGTGAGCGAGCGAGCGCGCAGAGA | |
| | GGGAGTGGCCAACTCCATCACTAGGGGTTCCT | |
| ITR-35 | CCTGCAGGCAGCTGCGCGCTCGCTCGCTCACTGAGGCCGCCCGGG | 34 |
| Left | CAAAGCCCGGGCGTCGGCCTCAGTGAGCGAGCGAGCGCGCAGAG | |
| | AGGGAGTGGCCAACTCCATCACTAGGGGTTCCT | |
| ITR-36 | CCTGCAGGCAGCTGCGCGCTCGCTCGCTCACTGAGGCGCCCGGGC | 35 |
| Left | GTCGGGCGACCTTTGGTCGCCCGGCCTCAGTGAGCGAGCGAGCGC | |
| | GCAGAGAGGGAGTGGCCAACTCCATCACTAGGGGTTCCT | |
| ITR-37 | CCTGCAGGCAGCTGCGCGCTCGCTCGCTCACTGAGGCAAAGCCTC | 36 |
| Left | AGTGAGCGAGCGAGCGCGCAGAGAGGGAGTGGCCAACTCCATCA | |
| | CTAGGGGTTCCT | |
| ITR-38 | CCTGCAGGCAGCTGCGCGCTCGCTCGCTCACTGAGGCCGCCCGGG | 37 |
| Left | CAAAGCCCGGGCGTCGGGCGACTTTGTCGCCCGGCCTCAGTGAGC | |
| | GAGCGAGCGCGCAGAGAGGGAGTGGCCAACTCCATCACTAGGGGT | |
| | TCCT | |
| ITR-39 | CCTGCAGGCAGCTGCGCGCTCGCTCGCTCACTGAGGCCGCCCGGG | 38 |
| Left | CAAAGCCCGGGCGTCGGGCGATTTTCGCCCGGCCTCAGTGAGCGA | |
| | GCGAGCGCGCAGAGAGGGAGTGGCCAACTCCATCACTAGGGGTTC | |
| | CT | |
| ITR-40 | CCTGCAGGCAGCTGCGCGCTCGCTCGCTCACTGAGGCCGCCCGGG | 39 |
| Left | CAAAGCCCGGGCGTCGGGCGTTTCGCCCGGCCTCAGTGAGCGAGC | |
| | GAGCGCGCAGAGAGGGAGTGGCCAACTCCATCACTAGGGGTTCCT | |
| ITR-41 | CAAAGCCCGGGCGTCGGGCTTTGCCCGGCCTCAGTGAGCGAGCGA | 40 |
| Left | CCTGCAGGCAGCTGCGCGCTCGCTCGCTCACTGAGGCCGCCCGGG | |
| | CAAAGCCCGGGCGTCGGGCTTTGCCCGGCCTCAGTGAGCGAGCGA | |
| | GCGCGCAGAGAGGGAGTGGCCAACTCCATCACTAGGGGTTCCT | |
| ITR-42 | CCTGCAGGCAGCTGCGCGCTCGCTCGCTCACTGAGGCCGCCCGGG | 41 |
| Left | AAACCCGGGCGTCGGGCGACCTTTGGTCGCCCGGCCTCAGTGAGC | |
| | GAGCGAGCGCGCAGAGAGGGAGTGGCCAACTCCATCACTAGGGGT | |
| | TCCT | |
| ITR-43 | CCTGCAGGCAGCTGCGCGCTCGCTCGCTCACTGAGGCCGCCCGGA | 42 |
| Left | AACCGGGCGTCGGGCGACCTTTGGTCGCCCGGCCTCAGTGAGCGA | |
| | GCGAGCGCGCAGAGAGGGAGTGGCCAACTCCATCACTAGGGGTTC | |
| | CT | |
| ITR-44 | CCTGCAGGCAGCTGCGCGCTCGCTCGCTCACTGAGGCCGCCCGAA | 43 |
| Left | ACGGGCGTCGGGCGACCTTTGGTCGCCCGGCCTCAGTGAGCGAGC | |
| | GAGCGCGCAGAGAGGGAGTGGCCAACTCCATCACTAGGGGTTCCT | |
| ITR-45 | CCTGCAGGCAGCTGCGCGCTCGCTCGCTCACTGAGGCCGCCCAAA | 44 |
| Left | GGGCGTCGGGCGACCTTTGGTCGCCCGGCCTCAGTGAGCGAGCGA | |
| | GCGCGCAGAGAGGGAGTGGCCAACTCCATCACTAGGGGTTCCT | |
| ITR-46 | CCTGCAGGCAGCTGCGCGCTCGCTCGCTCACTGAGGCCGCCAAAG | 45 |
| Left | GCGTCGGGCGACCTTTGGTCGCCCGGCCTCAGTGAGCGAGCGAGC | |
| | GCGCAGAGAGGGAGTGGCCAACTCCATCACTAGGGGTTCCT | |
| ITR-47 | CCTGCAGGCAGCTGCGCGCTCGCTCGCTCACTGAGGCCGCAAAGC | 46 |
| Left | GTCGGGCGACCTTTGGTCGCCCGGCCTCAGTGAGCGAGCGAGCGC | |
| | GCAGAGAGGGAGTGGCCAACTCCATCACTAGGGGTTCCT | |
| ITR-48 | CCTGCAGGCAGCTGCGCGCTCGCTCGCTCACTGAGGCCGAAACGT | 47 |
| Left | CGGGCGACCTTTGGTCGCCCGGCCTCAGTGAGCGAGCGAGCGCGC | |
| | AGAGAGGGAGTGGCCAACTCCATCACTAGGGGTTCCT | |

[0277] In one embodiment, a ceDNA vector for expression of PAH protein comprises, in the 5′ to 3′ direction: a first adeno-associated virus (AAV) inverted terminal repeat (ITR), a nucleic acid sequence of interest (for example an expression cassette comprising a codon modified nucleic acid as described herein) and a second AAV ITR, where the first ITR (5′ ITR) and the second ITR (3′ ITR) are asymmetric with respect to each other—that is, they have a different 3D-spatial configuration from one another. As an exemplary embodiment, the first ITR can be a wild-type ITR and the second ITR can be a mutated or modified ITR, or vice versa, where the first ITR can be a mutated or modified ITR and the second ITR a wild-type ITR. In some embodiment, the first ITR and the second ITR are both mod-ITRs, but have different sequences, or have different modifications, and thus are not the same modified ITRs, and have different 3D spatial configurations. Stated differently, a ceDNA vector with asymmetric ITRs comprises ITRs where any changes in one ITR relative to the WT-ITR are not reflected in the other ITR; or alternatively, where the asymmetric ITRs have a modified asymmetric ITR pair can have a different sequence and different three-dimensional shape with respect to each other. Exemplary asymmetric ITRs in the ceDNA vector for expression of PAH protein and for use to generate a ceDNA-plasmid are shown in Table 5A and 5B.

[0278] In an alternative embodiment, a ceDNA vector for expression of PAH protein comprises two symmetrical mod-ITRs—that is, both ITRs have the same sequence, but are reverse complements (inverted) of each other. In some embodiments, a symmetrical mod-ITR pair comprises at least one or any combination of a deletion, insertion, or substitution relative to wild type ITR sequence from the same AAV serotype. The additions, deletions, or substitutions in the symmetrical ITR are the same but the reverse complement of each other. For example, an insertion of 3 nucleotides in the C region of the 5′ ITR would be reflected in the insertion of 3 reverse complement nucleotides in the corresponding section in the C′ region of the 3′ ITR. Solely for illustration purposes only, if the addition is AACG in the 5′ ITR, the addition is CGTT in the 3′ ITR at the corresponding site. For example, if the 5′ ITR sense strand is ATCGATCG (SEQ ID NO:608) with an addition of AACG between the G and A to result in the sequence ATCGAACGATCG (SEQ ID NO: 51). The corresponding 3′ ITR sense strand is CGATCGAT (SEQ ID NO:606) (the reverse complement of ATCGATCG (SEQ ID NO:607)) with an addition of CGTT (i.e., the reverse complement of AACG) between the T and C to result in the sequence CGATCGTTCGAT (SEQ ID NO: 49) (the reverse complement of ATCGAACGATCG) (SEQ ID NO: 51).

[0279] In alternative embodiments, the modified ITR pair are substantially symmetrical as defined herein—that is, the modified ITR pair can have a different sequence but have corresponding or the same symmetrical three-dimensional shape. For example, one modified ITR can be from one serotype and the other modified ITR be from a different serotype, but they have the same mutation (e.g., nucleotide insertion, deletion or substitution) in the same region. Stated differently, for illustrative purposes only, a 5′ mod-ITR can be from AAV2 and have a deletion in the C region, and the 3′ mod-ITR can be from AAV5 and have the corresponding deletion in the C′ region, and provided the 5′ mod-ITR and the 3′ mod-ITR have the same or symmetrical three-dimensional spatial organization, they are encompassed for use herein as a modified ITR pair.

[0280] In some embodiments, a substantially symmetrical mod-ITR pair has the same A, C-C′ and B-B′ loops in 3D space, e.g., if a modified ITR in a substantially symmetrical mod-ITR pair has a deletion of a C-C′ arm, then the cognate mod-ITR has the corresponding deletion of the C-C′ loop and also has a similar 3D structure of the remaining A and B-B′ loops in the same shape in geometric space of its cognate mod-ITR. By way of example only, substantially symmetrical ITRs can have a symmetrical spatial organization such that their structure is the same shape in geometrical space. This can occur, e.g., when a G-C pair is modified, for example, to a C-G pair or vice versa, or A-T pair is modified to a T-A pair, or vice versa. Therefore, using the exemplary example above of modified 5′ ITR as a ATCGAACGATCG (SEQ ID NO: 51), and modified 3′ ITR as CGATCGTTCGAT (SEQ ID NO: 49) (i.e., the reverse complement of ATCGAACGATCG (SEQ ID NO: 51)), these modified ITRs would still be symmetrical if, for example, the 5′ ITR had the sequence of ATCGAACCATCG (SEQ ID NO: 50), where G in the addition is modified to C, and the substantially symmetrical 3′ ITR has the sequence of CGATCGTTCGAT (SEQ ID NO: 49), without the corresponding modification of the T in the addition to a. In some embodiments, such a modified ITR pair are substantially symmetrical as the modified ITR pair has symmetrical stereochemistry.

[0281] Table 6 shows exemplary symmetric modified ITR pairs (i.e. a left modified ITRs and the symmetric right modified ITR) for use in a ceDNA vector for expression of PAH protein. The bold portion of the sequences identify partial ITR sequences (i.e., sequences of A-A′, C-C′ and B-B′ loops). These exemplary modified ITRs can comprise the RBE of GCGCGCTCGCTCGCTC-3′ (SEQ ID NO: 60), spacer of ACTGAGGC (SEQ ID NO: 69), the spacer complement GCCTCAGT (SEQ ID NO: 70) and RBE′ (i.e., complement to RBE) of GAGCGAGCGAGCGCGC (SEQ ID NO: 71).

TABLE 6
Exemplary symmetric modified ITR pairs in a ceDNA
vector for expression of PAH protein

| LEFT modified ITR | | Symmetric RIGHT modified ITR | |
|---|---|---|---|
| (modified 5′ ITR) | | (modified 3′ ITR) | |
| SEQ ID | CCTGCAGGCAGCTGCGCGCTC | SEQ ID NO: 15 | AGGAACCCCTAGTGATG |
| NO: 32 | GCTCGCTCACTGAGGCCGCC | (ITR-18, right) | GAGTTGGCCACTCCCTCT |
| (ITR-33 | CGGGAAACCCGGGCGTGCGC | | CTGCGCGCTCGCTCGC |
| left) | CTCAGTGAGCGAGCGAGCGC | | TCACTGAGGCGCACGC |
| | GCAGAGAGGGAGTGGCCAACT | | CCGGGTTTCCCGGGCG |
| | CCATCACTAGGGGTTCCT | | GCCTCAGTGAGCGAGC |
| | | | GAGCGCGCAGCTGCCT |
| | | | GCAGG |
| SEQ ID | CCTGCAGGCAGCTGCGCGCTC | SEQ ID NO: 48 | AGGAACCCCTAGTGATG |
| NO: 33 | GCTCGCTCACTGAGGCCGTC | (ITR-51, right) | GAGTTGGCCACTCCCTCT |
| (ITR-34 | GGGCGACCTTTGGTCGCCCG | | CTGCGCGCTCGCTCGC |
| left) | GCCTCAGTGAGCGAGCGAGC | | TCACTGAGGCCGGGCG |
| | GCGCAGAGAGGGAGTGGCCA | | ACCAAAGGTCGCCCGA |
| | ACTCCATCACTAGGGGTTCCT | | CGGCCTCAGTGAGCGA |
| | | | GCGAGCGCGCAGCTGC |
| | | | CTGCAGG |
| SEQ ID | CCTGCAGGCAGCTGCGCGCTC | SEQ ID NO: 16 | AGGAACCCCTAGTGATG |
| NO: 34 | GCTCGCTCACTGAGGCCGCC | (ITR-19, right) | GAGTTGGCCACTCCCTCT |
| (ITR-35 | CGGGCAAAGCCCGGGCGTCG | | CTGCGCGCTCGCTCGC |
| left) | GCCTCAGTGAGCGAGCGAGC | | TCACTGAGGCCGACGC |
| | GCGCAGAGAGGGAGTGGCCA | | CCGGGCTTTGCCCGGG |
| | ACTCCATCACTAGGGGTTCCT | | CGGCCTCAGTGAGCGA |
| | | | GCGAGCGCGCAGCTGC |
| | | | CTGCAGG |
| SEQ ID | CCTGCAGGCAGCTGCGCGCTC | SEQ ID NO: 17 | AGGAACCCCTAGTGATG |
| NO: 35 | GCTCGCTCACTGAGGCGCCC | (ITR-20, right) | GAGTTGGCCACTCCCTCT |
| (ITR-36 | GGGCGTCGGGCGACCTTTGG | | CTGCGCGCTCGCTCGC |
| left) | TCGCCCGGCCTCAGTGAGCG | | TCACTGAGGCCGGGCG |
| | AGCGAGCGCGCAGAGAGGGA | | ACCAAAGGTCGCCCGA |
| | GTGGCCAACTCCATCACTAGG | | CGCCCGGGCGCCTCAG |
| | GGTTCCT | | TGAGCGAGCGAGCGCG |
| | | | CAGCTGCCTGCAGG |
| SEQ ID | CCTGCAGGCAGCTGCGCGCTC | SEQ ID NO: 18 | AGGAACCCCTAGTGATG |
| NO: 36 | GCTCGCTCACTGAGGCAAAG | (ITR-21, right) | GAGTTGGCCACTCCCTCT |
| (ITR-37 | CCTCAGTGAGCGAGCGAGCG | | CTGCGCGCTCGCTCGC |
| left) | CGCAGAGAGGGAGTGGCCAAC | | TCACTGAGGCTTTGCC |
| | TCCATCACTAGGGGTTCCT | | TCAGTGAGCGAGCGAG |
| | | | CGCGCAGCTGCCTGCAG |
| | | | G |
| SEQ ID | CCTGCAGGCAGCTGCGCGCTC | SEQ ID NO: 19 | AGGAACCCCTAGTGATG |
| NO: 37 | GCTCGCTCACTGAGGCCGCC | (ITR-22 right) | GAGTTGGCCACTCCCTCT |
| (ITR-38 | CGGGCAAAGCCCGGGCGTCG | | CTGCGCGCTCGCTCGC |
| left) | GGCGACTTTGTCGCCCGGCC | | TCACTGAGGCCGGGCG |
| | TCAGTGAGCGAGCGAGCGCG | | ACAAAGTCGCCCGACG |
| | CAGAGAGGGAGTGGCCAACTC | | CCCGGGCTTTGCCCGG |
| | CATCACTAGGGGTTCCT | | GCGGCCTCAGTGAGCG |
| | | | AGCGAGCGCGCAGCTG |
| | | | CCTGCAGG |
| SEQ ID | CCTGCAGGCAGCTGCGCGCTC | SEQ ID NO: 20 | AGGAACCCCTAGTGATG |
| NO: 38 | GCTCGCTCACTGAGGCCGCC | (ITR-23, right) | GAGTTGGCCACTCCCTCT |
| (ITR-39 | CGGGCAAAGCCCGGGCGTCG | | CTGCGCGCTCGCTCGC |
| left) | GGCGATTTTCGCCCGGCCTC | | TCACTGAGGCCGGGCG |
| | AGTGAGCGAGCGAGCGCGCA | | AAAATCGCCCGACGCC |
| | GAGAGGGAGTGGCCAACTCCA | | CGGGCTTTGCCCGGGC |
| | TCACTAGGGGTTCCT | | GGCCTCAGTGAGCGAG |
| | | | CGAGCGCGCAGCTGCC |
| | | | TGCAGG |
| SEQ ID | CCTGCAGGCAGCTGCGCGCTC | SEQ ID NO: 21 | AGGAACCCCTAGTGATG |
| NO: 39 | GCTCGCTCACTGAGGCCGCC | (ITR-24, right) | GAGTTGGCCACTCCCTCT |
| (ITR-40 | CGGGCAAAGCCCGGGCGTCG | | CTGCGCGCTCGCTCGC |
| left | GGCGTTTCGCCCGGCCTCAG | | TCACTGAGGCCGGGCG |
| | TGAGCGAGCGAGCGCGCAGA | | AAACGCCCGACGCCCG |
| | GAGGGAGTGGCCAACTCCATC | | GGCTTTGCCCGGGCGG |
| | ACTAGGGGTTCCT | | CCTCAGTGAGCGAGCG |
| | | | AGCGCGCAGCTGCCTGC |
| | | | AGG |
| SEQ ID | CCTGCAGGCAGCTGCGCGCTC | SEQ ID NO: 22 | AGGAACCCCTAGTGATG |
| NO: 40 | GCTCGCTCACTGAGGCCGCC | (ITR-25 right) | GAGTTGGCCACTCCCTCT |
| (ITR-41 | CGGGCAAAGCCCGGGCGTCG | | CTGCGCGCTCGCTCGC |
| left) | GGCTTTGCCCGGCCTCAGTG | | TCACTGAGGCCGGGCA |
| | AGCGAGCGAGCGCGCAGAGA | | AAGCCCGACGCCCGGG |
| | GGGAGTGGCCAACTCCATCAC | | CTTTGCCCGGGCGGCC |
| | TAGGGGTTCCT | | TCAGTGAGCGAGCGAG |
| | | | CGCGCAGCTGCCTGCAG |
| | | | G |
| SEQ ID | CCTGCAGGCAGCTGCGCGCTC | SEQ ID NO: 23 | AGGAACCCCTAGTGATG |
| NO: 41 | GCTCGCTCACTGAGGCCGCC | (ITR-26 right) | GAGTTGGCCACTCCCTCT |
| (ITR-42 | CGGGAAACCCGGGCGTCGGG | | CTGCGCGCTCGCTCGC |
| left) | CGACCTTTGGTCGCCCGGCC | | TCACTGAGGCCGGGCG |
| | TCAGTGAGCGAGCGAGCGCG | | ACCAAAGGTCGCCCGA |
| | CAGAGAGGGAGTGGCCAACTC | | CGCCCGGGTTTCCCGG |
| | CATCACTAGGGGTTCCT | | GCGGCCTCAGTGAGCG |
| | | | AGCGAGCGCGCAGCTG |
| | | | CCTGCAGG |
| SEQ ID | CCTGCAGGCAGCTGCGCGCTC | SEQ ID NO: 24 | AGGAACCCCTAGTGATG |
| NO: | GCTCGCTCACTGAGGCCGCC | (ITR-27 right) | GAGTTGGCCACTCCCTCT |
| 42(ITR-43 | CGGAAACCGGGCGTCGGGCG | | CTGCGCGCTCGCTCGC |
| left) | ACCTTTGGTCGCCCGGCCTC | | TCACTGAGGCCGGGCG |
| | AGTGAGCGAGCGAGCGCGCA | | ACCAAAGGTCGCCCGA |
| | GAGAGGGAGTGGCCAACTCCA | | CGCCCGGTTTCCGGGC |
| | TCACTAGGGGTTCCT | | GGCCTCAGTGAGCGAG |
| | | | CGAGCGCGCAGCTGCC |
| | | | TGCAGG |
| SEQ ID | CCTGCAGGCAGCTGCGCGCTC | SEQ ID NO: 25 | AGGAACCCCTAGTGATG |
| NO: 43 | GCTCGCTCACTGAGGCCGCC | (ITR-28 right) | GAGTTGGCCACTCCCTCT |
| (ITR-44 | CGAAACGGGCGTCGGGCGAC | | CTGCGCGCTCGCTCGC |
| left) | CTTTGGTCGCCCGGCCTCAG | | TCACTGAGGCCGGGCG |
| | TGAGCGAGCGAGCGCGCAGA | | ACCAAAGGTCGCCCGA |
| | GAGGGAGTGGCCAACTCCATC | | CGCCCGTTTCGGGCGG |
| | ACTAGGGGTTCCT | | CCTCAGTGAGCGAGCG |
| | | | AGCGCGCAGCTGCCTGC |
| | | | AGG |
| SEQ ID | CCTGCAGGCAGCTGCGCGCTC | SEQ ID NO: 26 | AGGAACCCCTAGTGATG |
| NO: 44 | GCTCGCTCACTGAGGCCGCC | (ITR-29, right) | GAGTTGGCCACTCCCTCT |
| (ITR-45 | CAAAGGGCGTCGGGCGACCT | | CTGCGCGCTCGCTCGC |
| left) | TTGGTCGCCCGGCCTCAGTG | | TCACTGAGGCCGGGCG |
| | AGCGAGCGAGCGCGCAGAGA | | ACCAAAGGTCGCCCGA |
| | GGGAGTGGCCAACTCCATCAC | | CGCCCTTTGGGCGGCC |
| | TAGGGGTTCCT | | TCAGTGAGCGAGCGAG |
| | | | CGCGCAGCTGCCTGCAG |
| | | | G |
| SEQ ID | CCTGCAGGCAGCTGCGCGCTC | SEQ ID NO: | AGGAACCCCTAGTGATG |
| NO: 45 | GCTCGCTCACTGAGGCCGCC | 27(ITR-30, right) | GAGTTGGCCACTCCCTCT |
| (ITR-46 | AAAGGCGTCGGGCGACCTTT | | CTGCGCGCTCGCTCGC |
| left) | GGTCGCCCGGCCTCAGTGAG | | TCACTGAGGCCGGGCG |
| | CGAGCGAGCGCGCAGAGAGG | | ACCAAAGGTCGCCCGA |
| | GAGTGGCCAACTCCATCACTA | | CGCCTTTGGCGGCCTC |
| | GGGGTTCCT | | AGTGAGCGAGCGAGCG |
| | | | CGCAGCTGCCTGCAGG |
| SEQ ID | CCTGCAGGCAGCTGCGCGCTC | SEQ ID NO: 28 | AGGAACCCCTAGTGATG |
| NO: 46 | GCTCGCTCACTGAGGCCGCA | (ITR-31, right) | GAGTTGGCCACTCCCTCT |
| (ITR-47, | AAGCGTCGGGCGACCTTTGG | | CTGCGCGCTCGCTCGC |
| left) | TCGCCCGGCCTCAGTGAGCG | | TCACTGAGGCCGGGCG |
| | AGCGAGCGCGCAGAGAGGGA | | ACCAAAGGTCGCCCGA |
| | GTGGCCAACTCCATCACTAGG | | CGCTTTGCGGCCTCAG |
| | GGTTCCT | | TGAGCGAGCGAGCGCG |
| | | | CAGCTGCCTGCAGG |
| SEQ ID | CCTGCAGGCAGCTGCGCGCTC | SEQ ID NO: 29 | AGGAACCCCTAGTGATG |
| NO: 47 | GCTCGCTCACTGAGGCCGAA | (ITR-32 right) | GAGTTGGCCACTCCCTCT |
| (ITR-48, | ACGTCGGGCGACCTTTGGTC | | CTGCGCGCTCGCTCGC |
| left) | GCCCGGCCTCAGTGAGCGAG | | TCACTGAGGCCGGGCG |
| | CGAGCGCGCAGAGAGGGAGT | | ACCAAAGGTCGCCCGA |
| | GGCCAACTCCATCACTAGGGG | | CGTTTCGGCCTCAGTG |
| | TTCCT | | AGCGAGCGAGCGCGCA |
| | | | GCTGCCTGCAGG |

[0282] In some embodiments, a ceDNA vector for expression of PAH protein comprising an asymmetric ITR pair can comprise an ITR with a modification corresponding to any of the modifications in ITR sequences or ITR partial sequences shown in any one or more of Tables 5A-5B herein, or the sequences shown in FIG. 7A-7B3 of International Application PCT/US2018/064242, filed Dec. 6, 2018, which is incorporated herein in its entirety, or disclosed in Tables 2, 3, 4, 5, 6, 7, 8, 9 or 10A-10B3 of International application PCT/US18/49996 filed Sep. 7, 2018 which is incorporated herein in its entirety by reference.

### V. Exemplary CeDNA Vectors

[0283] As described above, the present disclosure relates to recombinant ceDNA expression vectors and ceDNA vectors comprising codon modified nucleic acids that encode PAH protein, comprising any one of: an asymmetrical ITR pair, a symmetrical ITR pair, or substantially symmetrical ITR pair as described above. In certain embodiments, the disclosure relates to recombinant ceDNA vectors for expression of PAH protein having flanking ITR sequences and a transgene, where the ITR sequences are asymmetrical, symmetrical or substantially symmetrical relative to each other as defined herein, and the ceDNA further comprises a nucleic acid sequence of interest (for example an expression cassette comprising the nucleic acid of a transgene) located between the flanking ITRs, wherein said nucleic acid molecule is devoid of viral capsid protein coding sequences.

[0284] The ceDNA expression vector for expression of PAH protein may be any ceDNA vector that can be conveniently subjected to recombinant DNA procedures including nucleic acid sequence(s) as described herein, provided at least one ITR is altered. The ceDNA vectors for expression of PAH protein of the present disclosure are compatible with the host cell into which the ceDNA vector is to be introduced. In certain embodiments, the ceDNA vectors may be linear. In certain embodiments, the ceDNA vectors may exist as an extrachromosomal entity. In certain embodiments, the ceDNA vectors of the present disclosure may contain an element(s) that permits integration of a donor sequence into the host cell's genome. As used herein “transgene” and “heterologous nucleic acid sequence” are synonymous, and may encode a PAH protein, as described herein.

### A. Regulatory Elements.

[0285] The ceDNA vectors for expression of PAH protein as described herein comprising an asymmetric ITR pair or symmetric ITR pair as defined herein, can further comprise a specific combination of cis-regulatory elements.

[0286] Described herein are ceDNA vectors that comprise a PAH nucleic acid sequence that has been codon optimized and combined with particular cis-acting elements (e.g., specific promoters, specific enhancers and specific promoter and enhancer combinations), that have been tested for optimal correction of phenylalanine level (e.g., expression and duration). According to some embodiments, particular codon optimized PAH nucleic acid sequences perform better when combined with a specific promoter sequence and/or a specific enhancer sequence, compared to the same codon optimized PAH nucleic acid sequence combined with, e.g., another promoter sequence and/or a specific enhancer sequence.

[0287] In certain embodiments, an enhancer sequence is provided upstream of the promoter to increase the efficacy of the promoter.

[0288] In certain embodiments, an intron sequence is provided upstream of the codon optimized nucleic acid sequence.

[0289] (i) Promoters:

[0290] It will be appreciated by one of ordinary skill in the art that promoters used in the ceDNA vectors for expression of PAH protein as disclosed herein should be tailored as appropriate for the specific sequences and types of tissue or cell in which they are promoting.

Expression cassettes of the ceDNA vector for expression of PAH protein can include a promoter, which can influence overall expression levels as well as cell-specificity. For transgene expression, e.g., expression of PAH protein, they can include a highly active virus-derived immediate early promoter. Expression cassettes can contain tissue-specific eukaryotic promoters to limit transgene expression to specific cell types and reduce toxic effects and immune responses resulting from unregulated, ectopic expression. Tables 7A and 7B list core promoter sequences that can be implemented in ceDNA PAH therapeutic.

TABLE 7A
Core Promoters

| | Name | SEQ |
|---|---|---|
| GE- | hAAT_core | GATCTTGCTACCAGTGGAACAGCCACTAAGGATTCTGCAGTGA |
| 015 | (SEQ ID NO: 441) | GAGCAGAGGGCCAGCTAAGTGGTACTCTCCCAGAGACTGTCTG |
| | | ACTCACGCCACCCCCTCCACCTTGGACACAGGACGCTGTGGTTT |
| | | CTGAGCCAGGTACAATGACTCCTTTCGGTAAGTGCAGTGGAAG |
| | | CTGTACACTGCCCAGGCAAAGCGTCCGGGCAGCGTAGGCGGGC |
| | | GACTCAGATCCCAGCCAGTGGACTTAGCCCCTGTTTGCTCCTCC |
| | | GATAACTGGGGTGACCTTGGTTAATATTCACCAGCAGCCTCCCC |
| | | CGTTGCCCCTCTGGATCCACTGCTTAAATACGGACGAGGACAG |
| | | G |
| GE- | TTRm | GTCTGTCTGCACATTTCGTAGAGCGAGTGTTCCGATACTCTAAT |
| 1121 | (SEQ ID NO: 442) | CTCCCTAGGCAAGGTTCATATTTGTGTAGGTTACTTATTCTCCTT |
| | | TTGTTGACTAAGTCAATAATCAGAATCAGCAGGTTTGGAGTCA |
| | | GCTTGGCAGGGATCAGCAGCCTGGGTTGGAAGGAGGGGGTATA |
| | | AAAGCCCCTTCACCAGGAGAAGCCGTC |
| GE- | hAAT_core_C06 | GATCTTGCTACCAGTGGAACAGCCACTAAGGATTCTGCAGTGA |
| 1133 | (SEQ ID NO: 443) | GAGCAGAGGGCCAGCTAAGTGGTACTCTCCCAGAGACTGTCTG |
| | | ACTCATGCCACCCCCTCCACCTTGGACACAGGACACTGTGGTTT |
| | | CTGAGCCAGGTACAATGACTCCTTTTGGTAAGTGCAGTGGAAG |
| | | CTGTACACTGCCCAGGCAAAGTGTCCGGGCAGCGTAGGCGGGC |
| | | GACTCAGATCCCAGCCAGTGGACTTAGCCCCTGTTTGCTCCTCC |
| | | GATAACTGGGGTGACCTTGGTTAATATTCACCAGCAGCCTCCCC |
| | | CGTTGCCCCTCTGGATCCACTGCTTAAATACGGACGAGGACAG |
| | | G |
| GE- | hAAT_core_C07 | GATCTTGCTACCAGTGGAACAGCCACTAAGGATTCTGCAGTGA |
| 1134 | (SEQ ID NO: 444) | GAGCAGAGGGCCAGCTAAGTGGTACTCTCCCAGAGACTGTCTG |
| | | ACTCACGCCACCCCCTCCACCTTGGACACAGGACGCTGTGGTTT |
| | | CTGAGCCAGGTACAATGACTCCTTTCGGTAAGTGCAGTGGAAG |
| | | CTGTACACTGCCCAGGCAAAGCGTCCGGGCAGCGTAGGCGGGC |
| | | GACTCAGATCCCAGCCAGTGGACTTAGCCCCTGTTTGCTCCTCT |
| | | GATAACTGGGGTGACCTTGGTTAATATTCACCAGCAGCCTCCCC |
| | | TGTTGCCCCTCTGGATCCACTGCTTAAATACGGACAAGGACAG |
| | | G |
| GE- | hAAT_core_C08 | GATCTTGCTACCAGTGGAACAGCCACTAAGGATTCTGCAGTGA |
| 1135 | (SEQ ID NO: 445) | GAGCAGAGGGCCAGCTAAGTGGTACTCTCCCAGAGACTGTCTG |
| | | ACTCACGCCACCCCCTCCACCTTGGACACAGGACGCTGTGGTTT |
| | | CTGAGCCAGGTACAATGACTCCTTTCGGTAAGTGCAGTGGAAG |
| | | CTGTACACTGCCCAGGCAAAGCGTCTGGGCAGCATAGGCAGGC |
| | | GACTCAGATCCCAGCCAGTGGACTTAGCCCCTGTTTGCTCCTCC |
| | | GATAACTGGGGTGACCTTGGTTAATATTCACCAGCAGCCTCCCC |
| | | CGTTGCCCCTCTGGATCCACTGCTTAAATACGGACGAGGACAG |
| | | G |
| GE- | hAAT_core_C09 | GATCTTGCTACCAGTGGAACAGCCACTAAGGATTCTGCAGTGA |
| 1136 | (SEQ ID NO: 446) | GAGCAGAGGGCCAGCTAAGTGGTACTCTCCCAGAGACTGTCTG |
| | | ACTCACGCCACCCCCTCCACCTTGGACACAGGACGCTGTGGTTT |
| | | CTGAGCCAGGTACAATGACTCCTTTCGGTAAGTGCAGTGGAAG |
| | | CTGTACACTGCCCAGGCAAAGCGTCCGGGCAGCGTAGGCGGGC |
| | | GACTCAGATCCCAGCCAGTGGACTTAGCCCCTGTTTGCTCCTCT |
| | | GATAACTGGGGTGACCTTGGTTAATATTCACCAGCAGCCTCCCC |
| | | CGTTGCCCCTCTGGATCCACTGCTTAAATACAGACGAGGACAG |
| | | G |
| GE- | hAAT_core_C10 | GATCTTGCTACCAGTGGAACAGCCACTAAGGATTCTGCAGTGA |
| 1137 | (SEQ ID NO: 447) | GAGCAGAGGGCCAGCTAAGTGGTACTCTCCCAGAGACTGTCTG |
| | | ACTCATGCCACCCCCTCCACCTTGGACACAGGACACTGTGGTTT |
| | | CTGAGCCAGGTACAATGACTCCTTTTGGTAAGTGCAGTGGAAG |
| | | CTGTACACTGCCCAGGCAAAGTGTCTGGGCAGCATAGGCAGGT |
| | | GACTCAGATCCCAGCCAGTGGACTTAGCCCCTGTTTGCTCCTCT |
| | | GATAACTGGGGTGACCTTGGTTAATATTCACCAGCAGCCTCCCC |
| | | TGTTGCCCCTCTGGATCCACTGCTTAAATACAGACAAGGACAG |
| | | G |
| GE- | hAAT_core_ | GATTCTGCAGTGAGAGCAGAGGGCCAGCTAAGTGGTACTCTCC |
| 1170 | truncated | CAGAGACTGTCTGACTCACGCCACCCCCTCCACCTTGGACACA |
| | (SEQ ID NO: 448) | GGACGCTGTGGTTTCTGAGCCAGGTACAATGACTCCTTTCGGTA |
| | | AGTGCAGTGGAAGCTGTACACTGCCCAGGCAAAGCGTCCGGGC |
| | | AGCGTAGGCGGGCGACTCAGATCCCAGCCAGTGGACTTAGCCC |
| | | CTGTTTGCTCCTCCGATAACTGGGGTGACCTTGGTTAATATTCA |
| | | CCAGCAGCCTCCCCCGTTGCCCCTCTGGATCCACTGCTTAAATA |
| | | CGGACGAGGACAGG |

TABLE 7B
Core Promoter Description

| SEQ ID | | |
|---|---|---|
| NO/GE # | Name | Description |
| GE-015 | hAAT_core | Core promoter sequence from human A1AT gene |
| GE-1121 | TTRm | Core promoter sequence from mouse Transthyretin gene |
| GE-1133 | hAAT_core_C06 | CpG minimized version of the hAAT core promoter |
| | | (A1AT gene promoter) |
| GE-1134 | hAAT_core_C07 | CpG minimized version of the hAAT core promoter |
| | | (A1AT gene promoter) |
| GE-1135 | hAAT_core_C08 | CpG minimized version of the hAAT core promoter |
| | | (A1AT gene promoter) |
| GE-1136 | hAAT_core_C09 | CpG minimized version of the hAAT core promoter |
| | | (A1AT gene promoter) |
| GE-1137 | hAAT_core_C10 | CpG minimized version of the hAAT core promoter |
| | | (A1AT gene promoter) |
| GE-1170 | hAAT_core_truncated | 5p truncated hAAT core promoter derived from GE-015 |

[0291] According to particular embodiments, the promoter is selected from the group consisting of: the VD (also referred to as “VanD”) promoter, human alpha 1-antitrypsin (hAAT) promoter (including the CpG minimized hAAT(979) promoter (CpGmin hAAT_core_C10) and other CpGmin_hAAT promoters like hAAT_core_C06; hAAT_core_C07; hAAT_core_C08; and hAAT_core_C09) and the transthyretin (TTR) liver specific promoter.

[0292] In some embodiments, the VD promoter comprises the minute virus mouse (MVM) intron, the minimal transthyretin promoter (TTRm), the serpin enhancer (72 bp) and TTRm 5′ UTR.

[0293] According to some embodiments, the TTRm comprises SEQ ID NO:442, shown below:

(SEQ ID NO: 442)
GTCTGTCTGCACATTTCGTAGAGCGAGTGTTCC
GATACTCTAATCTCCCTAGGCAAGGTTCATATT
TGTGTAGGTTACTTATTCTCCTTTTGTTGACTA
AGTCAATAATCAGAATCAGCAGGTTTGGAGTCA
GCTTGGCAGGGATCAGCAGCCTGGGTTGGAAGG
AGGGGGTATAAAAGCCCCTTCACCAGGAGAAGC
CGTC.

[0294] According to some embodiments, the serpin enhancer comprises SEQ ID NO:449, shown below:

(SEQ ID NO: 449)
GGGGGAGGCTGCTGGTGAATATTAACCAAGGTCACC
CCAGTTATCGGAGGAGCAAACAGGGGCTAAGTCCAC.

[0295] According to some embodiments, the TTRm 5′UTR comprises SEQ ID NO:498, shown below:

(SEQ ID NO: 498)
ACACAGATCCACAAGCTCCTG.

[0296] According to further embodiments, the VD promoter comprises SEQ ID NO:191 shown below:

(SEQ ID NO: 191)
CCGTCTGTCTGCACATTTCGTAGAGCGAGTGTTC
CGATACTCTAATCTCCCTAGGCAAGGTTCATATT
TGTGTAGGTTACTTATTCTCCTTTTGTTGACTAA
GTCAATAATCAGAATCAGCAGGTTTGGAGTCAGC
TTGGCAGGGATCAGCAGCCTGGGTTGGAAGGAGG
GGGTATAAAAGCCCCTTCACCAGGAGAAGCCGTC
ACACAGATCCACAAGCTCCTG

[0297] According to some embodiments, the hAAT(979) promoter comprises SEQ ID NO: 447. An hAAT (979) containing promoter set is exemplified in SEQ ID NO:479.

[0298] According to some embodiments, the CpGmin_hAAT promoter comprises a sequence selected from SEQ ID NOs:443-447. According to some embodiments, the CpGmin_hAAT promoter set is SEQ ID NO:475. According to some embodiments, the CpGmin_hAAT promoter set is SEQ ID NO:479. According to some embodiments, the transthyretin (TTR) liver specific promoter comprises a sequence set forth in Table 7A (SEQ ID NO:442).

[0299] According to some embodiments, the promoter comprises a nucleic acid sequence having at least 95% identity to SEQ ID NO: 191.

[0300] According to some embodiments, wherein the promoter comprises a nucleic acid sequence having at least 95% identity to SEQ ID NO:443. According to some embodiments, wherein the promoter comprises a nucleic acid sequence having at least 95% identity to SEQ ID NO:444. According to some embodiments, wherein the promoter comprises a nucleic acid sequence having at least 95% identity to SEQ ID NO:445. According to some embodiments, wherein the promoter comprises a nucleic acid sequence having at least 95% identity to SEQ ID NO:446. According to some embodiments, wherein the promoter comprises a nucleic acid sequence having at least 95% identity to SEQ ID NO:447.

[0301] According to some embodiments, wherein the promoter comprises a nucleic acid sequence having at least 96% identity to SEQ ID NO:443. According to some embodiments, wherein the promoter comprises a nucleic acid sequence having at least 96% identity to SEQ ID NO:444. According to some embodiments, wherein the promoter comprises a nucleic acid sequence having at least 96% identity to SEQ ID NO:445. According to some embodiments, wherein the promoter comprises a nucleic acid sequence having at least 96% identity to SEQ ID NO:446. According to some embodiments, wherein the promoter comprises a nucleic acid sequence having at least 96% identity to SEQ ID NO:447.

[0302] According to some embodiments, wherein the promoter comprises a nucleic acid sequence having at least 97% identity to SEQ ID NO:443. According to some embodiments, wherein the promoter comprises a nucleic acid sequence having at least 97% identity to SEQ ID NO:444. According to some embodiments, wherein the promoter comprises a nucleic acid sequence having at least 97% identity to SEQ ID NO:445. According to some embodiments, wherein the promoter comprises a nucleic acid sequence having at least 97% identity to SEQ ID NO:446. According to some embodiments, wherein the promoter comprises a nucleic acid sequence having at least 97% identity to SEQ ID NO:447.

[0303] According to some embodiments, wherein the promoter comprises a nucleic acid sequence having at least 98% identity to SEQ ID NO:443. According to some embodiments, wherein the promoter comprises a nucleic acid sequence having at least 98% identity to SEQ ID NO:444. According to some embodiments, wherein the promoter comprises a nucleic acid sequence having at least 98% identity to SEQ ID NO:445. According to some embodiments, wherein the promoter comprises a nucleic acid sequence having at least 98% identity to SEQ ID NO:446. According to some embodiments, wherein the promoter comprises a nucleic acid sequence having at least 98% identity to SEQ ID NO:447.

[0304] According to some embodiments, wherein the promoter comprises a nucleic acid sequence having at least 99% identity to SEQ ID NO:443. According to some embodiments, wherein the promoter comprises a nucleic acid sequence having at least 99% identity to SEQ ID NO:444. According to some embodiments, wherein the promoter comprises a nucleic acid sequence having at least 99% identity to SEQ ID NO:445. According to some embodiments, wherein the promoter comprises a nucleic acid sequence having at least 99% identity to SEQ ID NO:446. According to some embodiments, wherein the promoter comprises a nucleic acid sequence having at least 99% identity to SEQ ID NO:447.

[0305] In some embodiments, a promoter set comprising a promoter sequence and an enhancer sequence described herein. According to some embodiments, wherein the promoter set comprises a nucleic acid sequence having at least 95% identity to SEQ ID NO:475. According to some embodiments, wherein the promoter comprises a nucleic acid sequence having at least 96% identity to SEQ ID NO:475. According to some embodiments, wherein the promoter comprises a nucleic acid sequence having at least 97% identity to SEQ ID NO:475. According to some embodiments, wherein the promoter comprises a nucleic acid sequence having at least 98% identity to SEQ ID NO:475. According to some embodiments, wherein the promoter comprises a nucleic acid sequence having at least 99% identity to SEQ ID NO:475.

[0306] In some embodiments, a promoter set comprising a promoter sequence and an enhancer sequence described herein. According to some embodiments, wherein the promoter comprises a nucleic acid sequence having at least 95% identity to SEQ ID NO:479. According to some embodiments, wherein the promoter comprises a nucleic acid sequence having at least 96% identity to SEQ ID NO:479. According to some embodiments, wherein the promoter comprises a nucleic acid sequence having at least 97% identity to SEQ ID NO:479. According to some embodiments, wherein the promoter comprises a nucleic acid sequence having at least 98% identity to SEQ ID NO:479. According to some embodiments, wherein the promoter comprises a nucleic acid sequence having at least 99% identity to SEQ ID NO:479.

[0307] (ii) Enhancers

[0308] In some embodiments, a ceDNA expressing a codon optimized PAH comprises one or more enhancers. In some embodiments, an enhancer sequence is located 5′ of the promoter sequence. In some embodiments, the enhancer sequence is located 3′ of the promoter sequence. According to some embodiments, According to some embodiments, an enhancer is selected from the group consisting of a serpin enhancer, 3×HNF1-4_ProEnh_10mer, 5×HNF1_ProEnh_10mer.

TABLE 8A
Enhancers

| SEQ ID NO | |
|---|---|
| GE-## | Name |
| SEQ ID NO: 449 | Human Serpin Enhancer (hSerpEnh) |
| GE-1115 | |
| SEQ ID NO: 450 | TTRe |
| GE-1116 | |
| SEQ ID NO: 451 | HNF1 |
| GE-1117 | |
| SEQ ID NO: 452 | HNF4 |
| GE-1118 | |
| SEQ ID NO: 453 | ApoE_Enh |
| GE-1119 | |
| SEQ ID NO: 454 | ProEnh |
| GE-1120 | |
| SEQ ID NO: 455 | ApoE_Enh_C03 |
| GE-1129 | |
| SEQ ID NO: 456 | ApoE_Enh_C04 |
| GE-1130 | |
| SEQ ID NO: 457 | ApoE_Enh_C09 |
| GE-1131 | |
| SEQ ID NO: 458 | ApoE_Enh_C10 |
| GE-1132 | |
| SEQ ID NO: 459 | Embedded_HCR1_footprint123 |
| GE-1127 | |
| SEQ ID NO: 460 | Embedded_enhancer_HNF_array |
| GE-1128 | |
| SEQ ID NO: 461 | ApoE_Enh_v2 |
| GE-1237 | |
| SEQ ID NO: 586 | HS-CRM_FOXA_HNF4_consensus_v1 |
| SEQ ID NO: 587 | 3x_HNF4_FOXA_v1 |
| SEQ ID NO: 588 | 1x_Bushbaby SerpEnh |
| SEQ ID NO: 589 | 3x_Bushbaby_Aspacers |
| SEQ ID NO: 590 | 1x_Chinese Tree Shrew SerpEnh |
| SEQ ID NO: 591 | 3x_ChineseTreeShrew |
| | (“C” spancer inbetween the repeats) |
| SEQ ID NO: 592 | 3x_ChineseTreeShrew_CpGmin |
| SEQ ID NO: 593 | 3x_hSerpEnh_Aspacers |
| | (“A” spacer) |
| SEQ ID NO: 594 | 5x_Bushbaby_Aspacers |
| SEQ ID NO: 595 | 5x_ChineseTreeShrew |
| SEQ ID NO: 596 | 3x_hSerpEnh_11mer_spacers_v3 |
| SEQ ID NO: 597 | 3x_hSerpEnh_30mer_spacers_v3 |
| SEQ ID NO: 598 | 3x_hSerpEnh_30mer_spacers_ |
| | HNF4revmer_spacers_FOXArev |
| SEQ ID NO: 599 | 3x_hSerpEnh_2mer_spacers_v10 |
| SEQ ID NO: 600 | 3x_hSerpEnh_2mer_spacers_v12 |
| SEQ ID NO: 601 | 3x_hSerpEnh_2mer_spacers_v9 |

TABLE 8B
Descriptions for Enhancer Elements

| GE-## | Name | Description |
|---|---|---|
| GE-1115 | SerpEnh | Enhancer region for Serpin1 gene |
| | | as reported by Chuah, M., et al. |
| | | (2014). Liver-Specific |
| | | Transcriptional Modules |
| | | Identified by Genome-Wide In |
| | | Silico Analysis Enable Efficient |
| | | Gene Therapy in Mice and Non- |
| | | Human Primates Molecular Therapy |
| | | 22(9), 1605-1613. Available at |
| | | dx.doi.org/10.1038/mt.2014.114; |
| | | Disclosed herein also includes |
| | | modified SerpEnh sequences |
| | | originated from bushbaby and |
| | | Chinese tree shrew. |
| GE-1116 | TTRe | Enhancer region for Transthyretin |
| | | gene |
| GE-1117 | HNF1 | Hepatic Nuclear Factor 1 binding |
| | | site |
| GE-1118 | HNF4 | Hepatic Nuclear Factor 4 binding |
| | | site |
| GE-1119 | ApoE_Enh | Human apolipoprotein E/C-I liver |
| | | specific enhancer |
| GE-1120 | ProEnh | Enhancer region from Pro-albumin |
| | | gene |
| GE-1129 | ApoE_Enh_C03 | CpG minimized version of the |
| | | ApoE_Enh (Human apolipoprotein |
| | | E/C-I liver specific enhancer) |
| GE-1130 | ApoE_Enh_C04 | CpG minimized version of the |
| | | ApoE_Enh (Human apolipoprotein |
| | | E/C-I liver specific enhancer) |
| GE-1131 | ApoE_Enh_C09 | CpG minimized version of the |
| | | ApoE_Enh (Human apolipoprotein |
| | | E/C-I liver specific enhancer) |
| GE-1132 | ApoE_Enh_C10 | CpG minimized version of the |
| | | ApoE_Enh (Human apolipoprotein |
| | | E/C-I liver specific enhancer) |
| GE-1127 | Embedded_HCR1_ | HCR1 footprint123 embedded in |
| | footprint123 | GE-856 (aka between GE-859/ |
| | | GE-860) |
| GE-1128 | Embedded_enhancer_ | Hepatic nuclear factor enhancer |
| | HNF_array | array embedded in GE-856 (aka |
| | | between GE-859/GE-860) |
| GE-1237 | ApoE_Enh_v2 | Derivative of Human apolipoprotein |
| | | E/C-I liver specific enhancer |
| GE-1402 | HS-CRM_FOXA_ | Human SERPINA1 enhancer |
| | HNF4_consensus_v1 | variant: |
| | | FOXA_HNF4_consensus_v1 |
| GE-1502 | 3x_HNF4_FOXA_v1 | 3 repeats of HS- |
| | | CRM8_FOXA_HNF4_consensus_ |
| | | v1 separated by a cytosine |

| | |
|---|---|
| 1x_Bushbaby SerpEnh | 1x repeat of the Bushbaby |
| | SERPINA1 enhancer |
| 3x_Bushbaby_Aspacers | 3x repeat of the Bushbaby |
| | SERPINA1 enhancer with adenine |
| | nucleotide spacer (“A” spacer) |
| 1x_Chinese Tree Shrew SerpEnh | 1x repeat of the Chinese Tree |
| | Shrew SERPINA1 enhancer |
| 3x_ChineseTreeShrew | 3x repeat of the Chinese Tree |
| (“C” spacer inbetween | Shrew SERPINA1 enhancer |
| the repeats) | (“C” spaner inbetween the repeats) |
| 3x_ChineseTreeShrew_CpGmin | 3x repeat of the Chinese Tree |
| | Shrew SERPINA1 enhancer with |
| | CpG minimization) |
| 3x_hSerpEnh_Aspacers | 3x repeat of the human SERPINA1 |
| (“A” spacer) | enhancer with 1 adenine between |
| | the repeats (“A” spacer)) |
| 5x_Bushbaby_Aspacers | 5x repeat of the Bushbaby |
| | SERPINA1 enhancer with adenine |
| | nucleotide spacer (“A” spacer) |
| 5x_ChineseTreeShrew | 5x repeat of the Chinese Tree |
| | Shrew SERPINA1 enhancer |
| 3x_hSerpEnh_11mer_spacers_v3 | 3x repeat of hSerpEnh with 11mer |
| | spacers v3 |
| 3x_hSerpEnh_30mer_spacers_v3 | 3x repeat of hSerpEnh with 30mer |
| | spacers v3 |
| 3x_hSerpEnh_30mer_spacers_ | 3x repeat of hSerpEnh with 30mer |
| HNF4revmer_spacers_FOXArev | spacers with HNF4 binding site in |
| | orientation 2 & FOXA binding site |
| | in orientation 1 |
| 3x_hSerpEnh_2mer_spacers_v10 | 3x repeat of hSerpEnh with 2mer |
| | spacers version 10 |
| 3x_hSerpEnh_2mer_spacers_v12 | 3x repeat of hSerpEnh with 2mer |
| | spacers version 12 |
| 3x_hSerpEnh_2mer_spacers_v9 | 3x repeat of hSerpEnh with 2mer |
| | spacers version 9 |

[0309] According to some embodiments, the 3×HNFI-4_ProEnh (Pro-albumin enhancer) enhancer fused to TTR promoter comprises the sequence set forth in SEQ ID NO:462. According to some embodiments, the 3×HNFI-4_ProEnh (Pro-albumin enhancer) enhancer fused to 3× VanD-TTRe and TTR promoter comprises the sequence set forth in SEQ ID NO:463.

[0310] According to some embodiments, the 5×HNF1_ProEnh_enhancer fused to TTR promoter comprises the sequence set forth in SEQ ID NO:464. According to some embodiments, the 5×HNF1_ProEnh_enhancer fused to 3×VanD-TTRe and TTR promoter comprises the sequence set forth in SEQ ID NO:465.

[0311] According to some embodiments, the serpin enhancer (SerpEnh) comprises the sequence set forth as:

(SEQ ID NO: 449)
GGGGGAGGCTGCTGGTGAATATTAACCAAGGTCACCCCAGTT
ATCGGAGGAGCAAACAGGGGCTAAGTCCAC.

[0312] In some other embodiments, the enhancer can be used in multitudes of tandem or repeated sequences. Non-limiting examples include the enhancer sequences described in SEQ ID NOs: 587-601.

TABLE 9A
Promoter Sets (Core promoter and Enhancer(s) combined)

| GE | Name (SEQ ID NO:) |
|---|---|
| GE-1223 | PromoterSet for ceDNA1471 |
| | (SEQ ID NO: 462) |
| GE-1224 | PromoterSet for ceDNA1472 |
| | (SEQ ID NO: 463) |
| GE-1225 | PromoterSet for ceDNA1473 |
| | (SEQ ID NO: 464) |
| GE-1226 | PromoterSet for ceDNA1474 |
| | (SEQ ID NO: 465) |
| GE-1227 | PromoterSet for ceDNA1475 |
| | (SEQ ID NO: 466) |
| GE-1228 | PromoterSet for ceDNA1476 |
| | (SEQ ID NO: 467) |
| GE-1229 | PromoterSet for ceDNA1477 |
| | (SEQ ID NO: 468) |
| GE-1230 | PromoterSet for ceDNA1478 |
| | (SEQ ID NO: 469) |
| GE-1231 | PromoterSet for ceDNA1479 |
| | (SEQ ID NO: 470) |
| GE-1232 | PromoterSet for ceDNA1480 |
| | (SEQ ID NO: 471) |
| GE-1233 | PromoterSet for ceDNA1368 |
| | (SEQ ID NO: 472) |
| GE-1234 | PromoterSet for ceDNA1648 |
| | (SEQ ID NO: 473) |
| GE-1235 | PromoterSet for ceDNA1657 |
| | (SEQ ID NO: 474) |
| GE-1236 | PromoterSet for ceDNA1622 |
| | (SEQ ID NO: 475) |
| GE-1270 | PromoterSet for ceDNA1664 |
| | (SEQ ID NO: 478) |
| GE-1271 | PromoterSet for ceDNA979 |
| | (SEQ ID NO: 479) |
| GE-576 | hPAH-endoPromoter_v2 |
| | (SEQ ID NO: 480) |
| GE-586 | hPAH-endoPromoter_v2_deltaKozak |
| | (SEQ ID NO: 481) |

TABLE 9B
Promoter set (core promoter and enhancer(s) combined) Annotation

| GE-## | Name | Description |
|---|---|---|
| GE-1223 | Promoter Set for | Synthetic Liver specific PromoterSet including |
| | ceDNA1471 | enhancers and core promoter (without 5pUTR) |
| | (3xHNF1-4 \|\| Pro-Albumin | |
| | Enh \|\| TTR promoter) | |
| GE-1224 | Promoter Set for | Synthetic Liver specific PromoterSet including |
| | ceDNA1472 | enhancers and core promoter (without 5pUTR) |
| | (3xHNF1-4 \|\| Pro-Albumin | |
| | Enh \|\| 3xVanD-TTRe \|\| TTR | |
| | promoter) | |
| GE-1225 | PromoterSet for | Synthetic Liver specific PromoterSet including |
| | ceDNA1473 | enhancers and core promoter (without 5pUTR) |
| | (5xHNF1 \|\| Pro-Albumin | |
| | Enh \|\| TTR promoter) | |
| GE-1226 | Promoter Set for | Synthetic Liver specific PromoterSet including |
| | ceDNA1474 | enhancers and core promoter (without 5pUTR) |
| | (5xHNF1 \|\| Pro-Albumin | |
| | Enh \|\| 3xVanD-TTRe \|\| TTR | |
| | promoter) | |
| GE-1227 | Promoter Set for | Synthetic Liver specific PromoterSet including |
| | ceDNA1475 | enhancers and core promoter (without 5pUTR) |
| | (3xHNF1-4_Pro-Albumin | |
| | Enh \|\| hAAT promoter) | |
| GE-1228 | Promoter Set for | Synthetic Liver specific PromoterSet including |
| | ceDNA1476 | enhancers and core promoter (without 5pUTR) |
| | (3xHNF1-4_Pro-Albumin | |
| | Enh \|\| hAAT promoter) | |
| GE-1229 | Promoter Set for | Synthetic Liver specific PromoterSet including |
| | ceDNA1477 | enhancers and core promoter (without 5pUTR) |
| | (3xHNF1-4_Pro-hAAT- | |
| | 10mer-ApoE) | |
| GE-1230 | Promoter Set-1478 | Synthetic Liver specific PromoterSet including |
| | (5xHNF1-Pro-hAAT) | enhancers and core promoter (without 5pUTR) |
| GE-1231 | Promoter Set-1479 | Synthetic Liver specific PromoterSet including |
| | (5xHNF1-Pro-Albumin | enhancers and core promoter (without 5pUTR) |
| | Enh \|\| hAAT promoter) | |
| GE-1232 | Promoter Set-1480 | Synthetic Liver specific PromoterSet including |
| | (5xHNF1-Pro-hAAT- | enhancers and core promoter (without 5pUTR) |
| | 10mer-ApoE) | |
| GE-1233 | Promoter Set-1368 | Synthetic Liver specific PromoterSet including |
| | (VD Promoter set) | enhancers and core promoter (without 5pUTR) |
| GE-1234 | Promoter Set-1648 | Synthetic Liver specific PromoterSet including |
| | (3X serpin enhancer plus | enhancers and core promoter (without 5pUTR) |
| | TTRe; 3X VD Promoter set) | |
| GE-1235 | Promoter Set-1657 | Synthetic Liver specific PromoterSet including |
| | | enhancers and core promoter (without 5pUTR) |
| GE-1236 | Promoter Set-1622 | Synthetic Liver specific PromoterSet including |
| | (CpG minimized hAAT | enhancers and core promoter (without 5pUTR) |
| | promoter set) | |
| GE-1270 | Promoter Set-1664 | Synthetic Liver specific PromoterSet including |
| | | enhancers and core promoter (without 5pUTR) |
| GE-1271 | PromoterSet-979 | Synthetic Liver specific PromoterSet including |
| | (hAAT 979 promoter set) | enhancers and core promoter (without 5pUTR) |
| GE-576 | hPAH-endoPromoter_v2 | Human PAH endogenous promoter |
| GE-586 | hPAH-endoPromoter_ | Human PAH endogenous promoter |
| | v2_delta Kozak | |
| | 3x_Bushbaby SerpEnh- | |
| | TTRe-TTR promoter set | |
| | (SEQ ID NO: 602) | |
| | 3x_Chinese tree shrew | |
| | SerpEnh-TTRe-TTR | |
| | promoter set | |
| | (SEQ ID NO: 603) | |

TABLE 9C
Promoter sets: Combinations of the hAAT CpG minimized enhancer
and core promoters CpG minimized hAAT core_C10 (hAAT_979)
or hAAT_core_C06).

| | SEQ ID NO: |
|---|---|
| | CpG minimized hAAT |
| Name | Promoter Set Sequences |
| PromoterSet-970 | 604 |
| PromoterSet-971 | 1001 |
| PromoterSet-972 | 1002 |
| PromoterSet-973 | 1003 |
| PromoterSet-974 | 1004 |
| PromoterSet-975 | 1005 |
| PromoterSet-976 | 1006 |
| PromoterSet-977 | 1007 |
| PromoterSet-978 | 1008 |

[0313] (iii) 5′ UTR Sequences and Intron Sequences

[0314] In some embodiments, a ceDNA vector comprises a 5′ UTR sequence and/or an intron sequence that located 3′ of the 5′ ITR sequence. In some embodiments, the 5′ UTR is located 5′ of the transgene, e.g., sequence encoding the PAH protein. Exemplary 5′ UTR sequences listed in Table 10 below or in International Patent Application No. PCT/US2020/021328, for example in Table 9A, incorporated by reference in its entirety herein.

TABLE 10
5' UTR

| | | SEQ |
|---|---|---|
| GE# | Description | ID NO |
| GE-1124 | TTR-MVM-PmeI-Consensus-5pUTR | 482 |
| GE-1125 | TTR-MVM_v2-PmeI-Consensus-5pUTR | 483 |
| GE-1126 | TTR-MVM-PmeI*-Consensus-5pUTR | 484 |
| GE-1138 | hAAT-5pUTR_v2 | 485 |
| GE-1167 | TTR-MVMspliced-PmeI-Consensus-5pUTR | 486 |
| GE-772 | 5pUTR-325243 | 487 |
| GE-774 | 5pUTR-constant | 489 |
| GE-1208 | hAAT-SV40-PmeI-Mod-5pUTR | 490 |
| GE-1209 | hAAT-SV40-PmeI-Mod2-5pUTR | 491 |
| GE-1210 | hAAT-SV40-PmeI-Con-5pUTR | 492 |
| GE-1211 | hAAT-SV40-PmeI-325243-5pUTR | 493 |
| GE-1212 | hAAT-SV40-PmeI-536-5pUTR | 494 |
| GE-1219 | TTR-Xbal-MVM-PmeI-Consensus-5pUTR | 495 |
| GE-1220 | TTR-XbaI-MVM_v2-PmeI-Consensus-5pUTR | 496 |
| GE-1221 | TTR-XbaI-MVM-PmeI*-Consensus-5pUTR | 497 |
| GE-1122 | TTR-5pUTR | 498 |
| GE-1260 | hAAT-PmeI-Mod2-5pUTR | 400 |
| GE-1261 | TTR-MVM_v2-PmeI-Mod2-5pUTR | 500 |
| GE-1262 | TTR-MVM-PmeI-325243-5pUTR Copy | 502 |
| GE-1263 | TTR-MVM-PmeI*-Mod2-5pUTR | 502 |
| GE-1264 | TTR-MVM-PmeI-Mod2-5pUTR | 503 |
| GE-1265 | TTR-MVMspliced-PmeI-Mod2-5pUTR | 504 |
| GE-1266 | TTR-XbaI-MVM_v2-PmeI-Mod2-5pUTR | 505 |
| GE-1267 | TTR-XbaI-MVM-PmeI*-Mod2-5pUTR | 506 |
| GE-1268 | TTR-XbaI-MVM-PmeI-Mod2-5pUTR | 507 |
| GE-1269 | hAAT-PmeI-Con-5pUTR | 508 |

TABLE 10B
5' UTR Descriptions

| GE-## | Name | Description |
|---|---|---|
| GE-1124 | TTR-MVM-PmeI-Consensus- | 5pUTR formed form concatenation of 1) the |
| | 5pUTR | Transthyretin promoter 5pUTR, 2) Minute Virus of |
| | | Mouse Intron, 3) Pmel restriction site, and 4) |
| | | consensus kozak sequence |
| GE-1125 | TTR-MVM_v2-PmeI- | 5pUTR formed form concatenation of 1) the |
| | Consensus-5pUTR | Transthyretin promoter 5pUTR, 2) Minute Virus of |
| | | Mouse Intron_v2, 3) Pmel restriction site, and 4) |
| | | consensus kozak sequence |
| GE-1126 | TTR-MVM-PmeI*- | 5pUTR formed form concatenation of 1) the |
| | Consensus-5pUTR | Transthyretin promoter 5pUTR, 2) Minute Virus of |
| | | Mouse Intron, 3) Mutated Pmel restriction site, and |
| | | 4) consensus kozak sequence |
| GE-1138 | hAAT-5pUTR_v2 | 5pUTR region derived from SERPINA1 (A1AT) |
| | | gene |
| GE-1167 | TTR-MVMspliced-PmeI- | 5pUTR formed form concatenation of 1) the |
| | Consensus-5pUTR | Transthyretin promoter 5pUTR, 2) Spliced form of |
| | | Minute Virus of Mouse Intron, 3) Pmel restriction |
| | | site, and 4) consensus kozak sequence |
| GE-772 | 5pUTR-325243 | 5pUTR variable region #325243 |
| GE-774 | 5pUTR-constant | 5pUTR constant region |
| GE-1208 | hAAT-SV40-PmeI-Mod- | 5pUTR formed form concatenation of 1) the hAAT |
| | 5pUTR | promoter 5pUTR, 2) SV40 intron, 3) PmeI restriction |
| | | site, and 4) modified kozak sequence |
| GE-1209 | hAAT-SV40-PmeI-Mod2- | 5pUTR formed form concatenation of 1) the hAAT |
| | 5pUTR | promoter 5pUTR, 2) SV40 intron, 3) Pmel restriction |
| | | site, and 4) modified kozak sequence v2 |
| GE-1210 | hAAT-SV40-PmeI-Con- | 5pUTR formed form concatenation of 1) the hAAT |
| | 5pUTR | promoter 5pUTR, 2) SV40 intron, 3) PmeI restriction |
| | | site, and 4) consensus kozak sequence |
| GE-1211 | hAAT-SV40-PmeI-325243- | 5pUTR formed form concatenation of 1) the hAAT |
| | 5pUTR | promoter 5pUTR, 2) SV40 intron, 3) PmeI restriction |
| | | site, and 4) 325243-5pUTR |
| GE-1212 | hAAT-SV40-PmeI-536- | 5pUTR formed form concatenation of 1) the hAAT |
| | 5pUTR | promoter 5pUTR, 2) SV40 intron, 3) PmeI restriction |
| | | site, and 4) 536-kozak |
| GE-1219 | TTR-Xbal-MVM-PmeI- | 5pUTR formed form concatenation of 1) the |
| | Consensus-5pUTR | Transthyretin promoter 5pUTR, 2) Xbal restriction |
| | | site, 3)Minute Virus of Mouse Intron, 4) PmeI |
| | | restriction site, and 5) consensus kozak sequence |
| GE-1220 | TTR-XbaI-MVM_v2-PmeI- | 5pUTR formed form concatenation of 1) the |
| | Consensus-5pUTR | Transthyretin promoter 5pUTR, 2) Xbal restriction |
| | | site, 3) Minute Virus of Mouse Intron_v2, 4) Pmel |
| | | restriction site, and 5) consensus kozak seqeunce |
| GE-1221 | TTR-XbaI-MVM-PmeI*- | 5pUTR formed form concatenation of 1) the |
| | Consensus-5pUTR | Transthyretin promoter 5pUTR, 2) Xbal restriction |
| | | site, 3) Minute Virus of Mouse Intron, 4) Mutated |
| | | PmeI restriction site, and 5) consensus kozak |
| | | sequence |
| GE-1122 | TTR-5pUTR | 5pUTR from mouse Transthyretin gene |
| GE-1260 | hAAT-PmeI-Mod2-5pUTR | 5pUTR formed by concatenation of 1) the hAAT |
| | | promoter 5pUTR, 3) PmeI restriction site, and 4) |
| | | modified kozak sequence v2 |
| GE-1261 | TTR-MVM_v2-PmeI-Mod2- | 5pUTR formed by concatenation of 1) the |
| | 5pUTR | Transthyretin promoter 5pUTR, 2) Minute Virus of |
| | | Mouse Intron_v2, 3) Pmel restriction site, and 4) |
| | | Mod_Minimum_Consensus_Kozak_v2 |
| GE-1262 | TTR-MVM-PmeI-325243- | 5pUTR formed by concatenation of 1) the |
| | 5pUTR Copy | Transthyretin promoter 5pUTR, 2) Minute Virus of |
| | | Mouse Intron, 3) Pmel restriction site, and 4) |
| | | 325243-5pUTR |
| GE-1263 | TTR-MVM-PmeI*- Mod2- | 5pUTR formed by concatenation of 1) the |
| | 5pUTR | Transthyretin promoter 5pUTR, 2) Minute Virus of |
| | | Mouse Intron, 3) Mutated Pmel restriction site, and |
| | | 4) Mod_Minimum_Consensus_Kozak_v2 |
| GE-1264 | TTR-MVM-PmeI-Mod2- | 5pUTR formed by concatenation of 1) the |
| | 5pUTR | Transthyretin promoter 5pUTR, 2) Minute Virus of |
| | | Mouse Intron, 3) Pmel restriction site, and 4) |
| | | Mod_Minimum_Consensus_Kozak_v2 |
| GE-1265 | TTR-MVMspliced-PmeI- | 5pUTR formed by concatenation of 1) the |
| | Mod2-5pUTR | Transthyretin promoter 5pUTR, 2) Spliced form of |
| | | Minute Virus of Mouse Intron, 3) PmeI restriction |
| | | site, and 4) Mod_Minimum_Consensus_Kozak_v2 |
| GE-1266 | TTR-XbaI-MVM_v2-PmeI- | 5pUTR formed by concatenation of 1) the |
| | Mod2-5pUTR | Transthyretin promoter 5pUTR, 2) Xbal restriction |
| | | site, 3) Minute Virus of Mouse Intron_v2, 4) Pmel |
| | | restriction site, and 5) |
| | | Mod_Minimum_Consensus_Kozak_v2 |
| GE-1267 | TTR-XbaI-MVM-PmeI*- | 5pUTR formed by concatenation of 1) the |
| | Mod2-5pUTR | Transthyretin promoter 5pUTR, 2) Xbal restriction |
| | | site, 3) Minute Virus of Mouse Intron, 4) Mutated |
| | | Pmel restriction site, and 5) |
| | | Mod_Minimum_Consensus_Kozak_v2 |
| GE-1268 | TTR-XbaI-MVM-PmeI- | 5pUTR formed by concatenation of 1) the |
| | Mod2-5pUTR | Transthyretin promoter 5pUTR, 2) Xbal restriction |
| | | site, 3) Minute Virus of Mouse Intron, 4) PmeI |
| | | restriction site, and 5) |
| | | Mod_Minimum_Consensus_Kozak_v2 |
| GE-1269 | hAAT-PmeI-Con-5pUTR | 5pUTR formed by concatenation of 1) the hAAT |
| | | promoter 5pUTR, 3) PmeI restriction site, and 4) |
| | | Consensus Kozak Sequence |

[0315] In some embodiments, a ceDNA vector comprises an intron that is located 5′ of the ORF. In some other embodiments, a ceDNA vector comprises an intron that is within the ORF sequence. Suitable intron sequences that can be used are listed in Table 11A below.

TABLE 11A
Chimeric Intron Sequences

| | | Sequence |
|---|---|---|
| GE | Name | Identifier |
| GE-1252 | hIVS-1B intron | 509 |
| GE-1253 | hIVS-1B-Wt | 510 |
| GE-1254 | hPAH_Modified_Intron1_CpGfree_v1 | 511 |
| GE-1255 | hPAH-delta2KbIntron | 512 |
| GE-1256 | mIVS-1B intron | 513 |
| GE-1257 | mIVS-1B-CpGfree_v1 | 514 |
| GE-1258 | Modified_intron | 515 |
| GE-1259 | oIVS-v2 | 516 |
| GE-1260 | MVM_intron_v2 | 1000 |

TABLE 11B
Chimeric Intron Sequence Description

| GE # | Name | Description |
|---|---|---|
| GE-1252 | hIVS-1B intron | Chimeric intron derived from hPAH intron 1. |
| | | Engineered to Remove CpG motifs |
| GE-1253 | hIVS-1B-Wt | Chimeric intron derived from hPAH intron 1. |
| | | Wt sequence with CpG motifs |
| GE-1254 | hPAH_Modified_Intron1_CpGfree_v1 | chimeric intron derived from hPAH intron 1. |
| | | CpG's removed based on hIVS-1B sequence |
| GE-1255 | hPAH-delta2KbIntron | Chimeric intron derived from hPAH intron 1. |
| GE-1256 | mIVS-1B intron | Chimeric intron derived from mPAH intron 1 |
| GE-1257 | mIVS-1B-CpGfree_v1 | Chimeric intron derived from mPAH intron 1, |
| | | engineered to remove CpG motifs |
| GE-1258 | Modified_intron | Chimeric intron derived from hPAH intron 1. |
| GE-1259 | oIVS-v2 | Chimeric intron derived from orangutan PAH |
| | | intron 1. CpG free intron |
| GE-1260 | MVM_intron_v2 | Modified minute virus of mice (MVM) intron |

[0316] According to some embodiments, an MVM intron can be also implemented in 5′ of the PAH open reading frame (e.g., as part of 5′UTR). The MVM intron comprises SEQ ID NO:1026, shown below:

(SEQ ID NO: 1026)
AAGAGGTAAGGGTTTAAGGGATGGTTGGTTGGTGGGGTATT
AATGTTTAATTACCTGGAGCACCTGCCTGAAATCACTTTTT
TTCAGGTTG

[0317] (iv) 3′ UTR Sequences

[0318] In some embodiments, a ceDNA vector comprises a 3′ UTR sequence that located 5′ of the 3′ ITR sequence. In some embodiments, the 3′ UTR is located 3′ of the transgene, e.g., sequence encoding the PAH protein. Exemplary 3′ UTR sequences listed in Table 12 below or in International Application No. PCT/US2020/021328, for example in Table 9B3, incorporated by reference in its entirety herein.

TABLE 12
3' UTR Elements

| SEQ ID No. | Name | Description |
|---|---|---|
| SEQ ID NO:517 | bGH | Poly A signal derived from gene encoding bovine |
| (GE-001) | | growth hormone (bGH) |
| SEQ ID NO:518 | WPRE_3pUTR | Postranscriptional regulatory element derived from |
| (GE-007) | | Woodchuck Hepatitis Virus |
| SEQID NO:519 | SV40_polyA | PolyA region from SV40 virus |
| (GE-081) | | |
| SEQID NO:520 | HBB_3pUTR | Derived from Human hemoglobin beta (HBB) gene |
| (GE-080) | | 3pUTR |
| SEQID NO:521 | HBBv3_3pUTR | Derived from Human hemoglobin beta (HBB) gene |
| (GE-761) | | 3pUTR |
| SEQID NO:522 | HBBv2_3pUTR | Derived from Human hemoglobin beta (HBB) gene |
| (GE-720) | | 3pUTR |
| SEQID NO:523 | HBBv3_CpGmin | Derived from Human hemoglobin beta (HBB) gene |
| (GE-758) | | 3pUTR |
| SEQID NO:524 | HBBv2_CpGmin | Derived from Human hemoglobin beta (HBB) gene |
| (GE-760) | | 3pUTR |
| SEQID NO:525 | HBB-3pUTR- | Derived from Human hemoglobin beta (HBB) gene |
| (GE-582) | CpGmin_v1 | 3pUTR |

[0319] The ceDNA vectors for expression of PAH protein can further comprise a posttranscriptional regulatory element (WPRE) and BGH polyA.

[0320] (v) Polyadenylation Sequences

[0321] A sequence encoding a polyadenylation sequence can be included in the ceDNA vector for expression of PAH protein to stabilize an mRNA expressed from the ceDNA vector, and to aid in nuclear export and translation. In one embodiment, the ceDNA vector does not include a polyadenylation sequence. In other embodiments, the ceDNA vector for expression of PAH protein includes at least 1, at least 2, at least 3, at least 4, at least 5, at least 10, at least 15, at least 20, at least 25, at least 30, at least 40, least 45, at least 50 or more adenine dinucleotides. In some embodiments, the polyadenylation sequence comprises about 43 nucleotides, about 40-50 nucleotides, about 40-55 nucleotides, about 45-50 nucleotides, about 35-50 nucleotides, or any range there between.

[0322] The expression cassettes can include any poly-adenylation sequence known in the art or a variation thereof. In some embodiments, a poly-adenylation (polyA) sequence is selected from any of those listed in International Patent Application No. PCT/US2020/021328, for example in Table 10, incorporated by reference in its entirety herein. Other polyA sequences commonly known in the art can also be used, e.g., including but not limited to, naturally occurring sequence isolated from bovine BGHpA (e.g., SEQ ID NO: 68) or a virus SV40 pA (e.g., SEQ ID NO: 86), or a synthetic sequence (e.g., SEQ ID NO: 87). Some expression cassettes can also include SV40 late polyA signal upstream enhancer (USE) sequence. In some embodiments, a USE sequence can be used in combination with SV40 pA or heterologous poly-A signal. PolyA sequences are located 3′ of the transgene encoding the PAH protein.

[0323] The expression cassettes can also include a post-transcriptional element to increase the expression of a transgene. In some embodiments, Woodchuck Hepatitis Virus (WHP) posttranscriptional regulatory element (WPRE) (e.g., SEQ ID NO: 67) is used to increase the expression of a transgene. Other posttranscriptional processing elements such as the post-transcriptional element from the thymidine kinase gene of herpes simplex virus, or hepatitis B virus (HBV) can be used. Secretory sequences can be linked to the transgenes, e.g., VH-02 and VK-A26 sequences, e.g., SEQ ID NO: 88 and SEQ ID NO: 89.

[0324] (vi) Nuclear Localization Sequences and DNA Nuclear Targeting Sequences

[0325] In some embodiments, the ceDNA vector for expression of PAH protein comprises one or more nuclear localization sequences (NLSs), for example, 1, 2, 3, 4, 5, 6, 7, 8, 9, 10, or more NLSs. In some embodiments, the one or more NLSs are located at or near the amino-terminus, at or near the carboxy-terminus, or a combination of these (e.g., one or more NLS at the amino-terminus and/or one or more NLS at the carboxy terminus). When more than one NLS is present, each can be selected independently of the others, such that a single NLS is present in more than one copy and/or in combination with one or more other NLSs present in one or more copies. Non-limiting examples of NLSs are shown in Table 13A.

[0326] In some embodiments, the ceDNA vector for expression of PAH protein comprises one or more DNA nuclear targeting sequences (DTS) to promote ceDNA being taken into the nucleus of target cells. Table 13B listing non-limiting examples of DTS that can be implemented in a ceDNA vector expressing PAH protein.

TABLE 13A
Nuclear Localization Signals

| | SEQ |
|---|---|
| | ID |
| SOURCE | NO. |
| SV40 virus large T-antigen | 90 |
| nucleoplasmin | 92 |
| c-myc | 93 |
| | 94 |
| hRNPA1 M9 | 95 |
| IBB domain from importin-alpha | 96 |
| myoma T protein | 97 |
| | 98 |
| human p53 | 99 |
| mouse c-abl IV | 100 |
| influenza virus NS1 | 117 |
| | 118 |
| Hepatitis virus delta antigen | 119 |
| mouse Mx1 protein | 120 |
| human poly(ADP-ribose) polymerase | 121 |
| steroid hormone receptors (human) glucocorticoid | 122 |

TABLE 13B
DNA Nuclear Targeting Sequences (DTS)

| | | SEQ |
|---|---|---|
| | | ID |
| GE | Name | NO |
| GE-723 | 3NF_DTS | 526 |
| GE-767 | 3'DTS_primer_pad | 527 |
| GE-766 | 5'DTS_primer_pad | 528 |
| GE-763 | 5x_kB_mesika_DTS | 529 |
| GE-764 | 2x_GRE_dames_DTS | 530 |
| GE-765 | CREB_badding_DTS | 531 |
| GE-597 | SV40DNA_DTS_10mer Repeat | 532 |
| GE-784 | 2x_Cgt_GRE_meijsing_DTS | 533 |
| GE-596 | SV40DNA_DTS_72bpSingleRepeat | 534 |
| GE-595 | SV40DNA_DTS_72bpTandemRepeat | 535 |
| GE-1222 | 10xSV40-DTS-arrray | 536 |

TABLE 13C
DTS Descriptions

| GE-## | Name | Description |
|---|---|---|
| GE-723 | 3NF_DTS | nuclear factor kappa B (NFκB) |
| | | transcription factor binding site triplet, |
| | | comprising three 10-bp κB sites |
| | | (GGGACTTTCC (SEQ ID NO: 1018) |
| | | separated by a 5-bp optimized spacer |
| | | (AGCTG) |
| GE-767 | 3'DTS_primer_pad | CpG-minimized spacer optimized for |
| | | priming in PCR |
| GE-766 | 5'DTS_primer_pad | CpG-minimized spacer optimized for |
| | | priming in PCR |
| GE-763 | 5x_kB_mesika_DTS | 5X repeat of Igk kB motif 5'- |
| | | GGGGACTTTCC-3' (SEQ ID NO: 1019), |
| | | 3 bp spacer, as described by Mesika et al., |
| | | 2001 Mol Ther |
| GE-764 | 2x_GRE_dames_DTS | 2X repeat of glucocorticoid response |
| | | element (GRE; origin not described), SalI |
| | | restriction site as spacer, as described by |
| | | Dames et al., 2007 J Gene Med |
| GE-765 | CREB_badding_DTS | Single CREB binding site as described by |
| | | Badding et al., 2012 Gene Ther |
| GE-597 | SV40DNA_DTS_10merRepeat | 5x 72bp tandem repeat from SV40 genome |
| | | separated by random CpG free 20 mer |
| | | sequences. |
| GE-784 | 2x_Cgt_GRE_meijsing_DTS | High activity, high affinity GRE binding |
| | | site |
| GE-596 | SV40DNA_DTS_72bpSingleRepeat | 72 base pair single repeat region from |
| | | SV40 genome. |
| GE-595 | SV40DNA_DTS_72bpTandemRepeat | 72 base pair tandem repeat region from |
| | | SV40 genome. |
| GE-1222 | 10xSV40-DTS-arrray | 5x Dual SV40 Enhancer elements separated |
| | | by CpGfree spacer elements |

B. Additional Components of ceDNA Vectors

[0327] The ceDNA vectors for expression of PAH protein of the present disclosure may contain other components, such as, but not limited to, Kozak sequences (Table 14A), minute virus of mice (MVM) introns, spacers, CpG motifs. In some embodiments, the ceDNA vector for expression of PAH protein may comprise one or more micro RNA (MIR) sequences involved immune responses or hepato-homestasis (Table 14B3).

TABLE 14A
Kozak Sequences

| GE-# | | |
|---|---|---|
| (SEQ ID NO.) | Name | Description |
| GE-031 | Consensus_Kozak | Consensus Kozak sequence |
| (SEQ ID NO:537) | | |
| GE-366 | Mod_Minimum_Consensus_Kozak_v1 | Modified Consensus Kozak |
| (SEQ ID NO:538) | | sequence |
| GE-1206 | Mod_Minimum_Consensus_Kozak_v2 | Modified Consensus Kozak |
| (SEQ ID NO:539) | | sequence |
| GE-1207 | 536_Kozak | Minimal Kozak seqeuence |
| (SEQ ID NO:540) | | |

TABLE 14B
MIR Sequences

| SEQ ID NO: | | |
|---|---|---|
| GE# | Name | Description |
| SEQ ID NO: 1009 | mir122_4x | micro-RNA involved in regulation of immune reponses |
| GE-699 | | |
| SEQ ID NO: 1010 | mir-142_3pUTR | micro-RNA involved in liver homeostasis |
| GE-020 | | |

### C. Combination of Elements and ORFs

[0328] According to some embodiments, specific codon optimized nucleic acid sequences are paired with one or more of a combination of particular promoters, enhancers or other cis-elements.

[0329] According to some embodiments, the codon optimized sequence comprises hPAH_codop_ORF_v2, and is paired with a nucleic acid sequence encoding a VD_PromoterSet, as described herein. According to some embodiments, the codon optimized sequence comprises hPAH_codop_ORF_v2, and is paired with a nucleic acid sequence encoding a VD_PromoterSet, as described herein, wherein the VD Promoter (e.g., TTRm) further comprises a SERP enhancer. According to some embodiments, the codon optimized sequence comprises hPAH_codop_ORF_v2, and is paired with a nucleic acid sequence encoding a VD_PromoterSet, as described herein, wherein the VD Promoter (e.g., TTRm) comprises 3×SERP enhancer. According to some embodiments, the codon optimized sequence comprises hPAH_codop_ORF_v2, and is paired with a nucleic acid sequence encoding a VD_PromoterSet, as described herein, wherein the VD Promoter comprises 3×SERP enhancer and further comprises a MVM intron.

[0330] According to some embodiments, the codon optimized sequence comprises hPAH_codop_ORF_v2, and is paired with a nucleic acid sequence encoding a hAAT (979)_PromoterSet, as described herein. According to some embodiments, the codon optimized sequence comprises hPAH_codop_ORF_v2, a and is paired with a nucleic acid sequence encoding a TTR liver specific promoter, as described herein, and further comprises a ProEnh_10mer and a MVM intron.

[0331] According to some embodiments, the codon optimized sequence comprises hPAH_codop_ORF_v2, and is paired with a nucleic acid sequence encoding a transthyretin (TTR) liver specific promoter, as described herein. According to some embodiments, the codon optimized sequence comprises hPAH_codop_ORF_v2, and is paired with a nucleic acid sequence encoding a transthyretin (TTR) liver specific promoter, as described herein, and further comprises an MVM intron. According to some embodiments, the codon optimized sequence comprises hPAH_codop_ORF_v2, and is paired with a nucleic acid sequence encoding a minimal transthyretin (TTRm) liver specific promoter, as described herein.

[0332] According to some embodiments, the codon optimized sequence comprises hPAH_codop_ORF_v2 delta1-29aa, and is paired with a nucleic acid sequence encoding a VD_PromoterSet or CpG minimized hAAT as described herein.

[0333] According to some embodiments, the codon optimized sequence comprises hPAH-r5-s29, and is paired with a nucleic acid sequence encoding a VD_PromoterSet, as described herein, wherein the VD Promoter comprises 3×SERP enhancer.

[0334] According to some embodiments, the ceDNA construct comprises left-ITR_v1, spacer_left-ITR_v2.1, VD_PromoterSet, PmeI_site, Mod_Minimum_Consensus_Kozak, hPAH_codop_ORF_v2, PacI_site, WPRE_3pUTR, bGH, spacer_right-ITR_v1, right-ITR_v1. According to some embodiments, the ceDNA construct consists of left-ITR_v1, spacer_left-ITR_v2.1, VD_PromoterSet, PmeI_site, Mod_Minimum_Consensus_Kozak, hPAH_codop_ORF_v2, PacI_site, WPRE_3pUTR, bGH, spacer_right-ITR_v1, right-ITR_v1.

[0335] According to some embodiments, the ceDNA construct comprises Left-ITR_v1: spacer_left-ITR_v1: VD_Promoter Set: PmeI_site: Consensus_Kozak: hPAH_cDNA_ORF_v3: PacI_site: WPRE_3pUTR: bGH: spacer_right-ITR_v1: right-ITR_v1. According to some embodiments, the ceDNA construct consists of Left-ITR_v1: spacer_left-ITR_v1: VD_Promoter Set: PmeI_site: Consensus_Kozak: hPAH_cDNA_ORF_v3: PacI_site: WPRE_3pUTR: bGH: spacer_right-ITR_v1: right-ITR_v1.

[0336] According to some embodiments, the ceDNA construct comprises Left-ITR_v1, spacer_left-ITR_v2.1, 3×SerpEnh-TTRe-TTRm, MVM_intron, PmeI_site, Mod_Minimum_Consensus_Kozak, hPAH_codop_ORF_v2, PacI_site, WPRE_3pUTR, bGH, spacer_right-ITR_v1, right-ITR_v1. According to some embodiments, the ceDNA construct consists of Left-ITR_v1, spacer_left-ITR_v2.1, 3×SerpEnh-TTRe-TTRm, MVM_intron, PmeI_site, Mod_Minimum_Consensus_Kozak, hPAH_codop_ORF_v2, PacI_site, WPRE_3pUTR, bGH, spacer_right-ITR_v1, right-ITR_v1.

[0337] According to some embodiments, the ceDNA construct comprises left-ITR_v1, spacer_left-ITR_v2.1, VD_PromoterSet, PmeI_site, Mod_Minimum_Consensus_Kozak, hPAH_codop_ORF_v2_delta1-29aa, PacI_site, WPRE_3pUTR, bGH, spacer_right-ITR_v1, right-ITR_v1. According to some embodiments, the ceDNA construct consists of left-ITR_v1, spacer_left-ITR_v2.1, VD_PromoterSet, PmeI_site, Mod_Minimum_Consensus_Kozak, hPAH_codop_ORF_v2_delta1-29aa, PacI_site, WPRE_3pUTR, bGH, spacer_right-ITR_v1, right-ITR_v1.

[0338] According to some embodiments, the ceDNA construct comprises left-ITR_v1, spacer_left-ITR_v2.1, 3×VanD_TTRe_PromoterSet, PmeI_site, Mod_Minimum_Consensus_Kozak, hPAH-r5-s29::hIVS1B, PacI_site, WPRE_3pUTR, bGH, spacer_right-ITR_v1, right-ITR_v1. According to some embodiments, the ceDNA construct consists of left-ITR_v1, spacer_left-ITR_v2.1, 3×VanD_TTRe_PromoterSet, PmeI_site, Mod_Minimum_Consensus_Kozak, hPAH-r5-s29::hIVS1B, PacI_site, WPRE_3pUTR, bGH, spacer_right-ITR_v1, right-ITR_v1.

[0339] According to some embodiments, the ceDNA construct comprises left-ITR_v1, spacer_left-ITR_v2.1, 3×VanD_TTRe_PromoterSet, PmeI_site, Mod_Minimum_Consensus_Kozak, hPAH-r5-s29::hIVS1B_33bpFlanks, PacI_site, WPRE_3pUTR, bGH, spacer_right-ITR_v1, right-ITR_v1. According to some embodiments, the ceDNA construct consists of left-ITR_v1, spacer_left-ITR_v2.1, 3×VanD_TTRe_PromoterSet, PmeI_site, Mod_Minimum_Consensus_Kozak, hPAH-r5-s29::hIVS1B_33bpFlanks, PacI_site, WPRE_3pUTR, bGH, spacer_right-ITR_v1, right-ITR_v1.

[0340] According to some embodiments, the ceDNA construct comprises left-ITR_v1, spacer_left-ITR_v2.1, 3×VanD_TTRe_PromoterSet, PmeI_site, Mod_Minimum_Consensus_Kozak, hPAH-r5-s29::mod-Intron_oIVS-v2_33bpFlanks, PacI_site, WPRE_3pUTR, bGH, spacer_right-ITR_v1, right-ITR_v1. According to some embodiments, the ceDNA construct consists of left-ITR_v1, spacer_left-ITR_v2.1, 3×VanD_TTRe_PromoterSet, PmeI_site, Mod_Minimum_Consensus_Kozak, hPAH-r5-s29::mod-Intron_oIVS-v2_33bpFlanks, PacI_site, WPRE_3pUTR, bGH, spacer_right-ITR_v1, right-ITR_v1.

[0341] According to some embodiments, the ceDNA construct comprises left-ITR_v1, spacer_left-ITR_v2.1, 3×VanD_TTRe_PromoterSet, PmeI_site, Mod_Minimum_Consensus_Kozak, hPAH_codop_ORF_v2_mIVS-intron1B_33bpFlanks, PacI_site, WPRE_3pUTR, bGH, spacer_right-ITR_v1, right-ITR_v1. According to some embodiments, the ceDNA construct consists of left-ITR_v1, spacer_left-ITR_v2.1, 3×VanD_TTRe_PromoterSet, PmeI_site, Mod_Minimum_Consensus_Kozak, hPAH_codop_ORF_v2_mIVS-intron1B_33bpFlanks, PacI_site, WPRE_3pUTR, bGH, spacer_right-ITR_v1, right-ITR_v1.

[0342] According to some embodiments, the ceDNA construct comprises left-ITR_v1, spacer_left-ITR_v2.1, 3×VanD_TTRe_PromoterSet, PmeI_site, Mod_Minimum_Consensus_Kozak, hPAH_codop_ORF_v2_modified_Intron1_33bpFlanks, PacI_site, WPRE_3pUTR, bGH, spacer_right-ITR_v1, right-ITR_v1. According to some embodiments, the ceDNA construct consists of left-ITR_v1, spacer_left-ITR_v2.1, 3×VanD_TTRe_PromoterSet, PmeI_site, Mod_Minimum_Consensus_Kozak, hPAH_codop_ORF_v2_modified_Intron1_33bpFlanks, PacI_site, WPRE_3pUTR, bGH, spacer_right-ITR_v1, right-ITR_v1.

[0343] According to some embodiments, the ceDNA construct comprises left-ITR_v1, spacer_left-ITR_v2.1, hAAT(979)_PromoterSet, PmeI_site, Mod_Minimum_Consensus_Kozak, hPAH_codop_ORF_v2, PacI_site, WPRE_3pUTR, bGH, spacer_right-ITR_v1, right-ITR_v1. According to some embodiments, the ceDNA construct consists of left-ITR_v1, spacer_left-ITR_v2.1, hAAT(979)_PromoterSet, PmeI_site, Mod_Minimum_Consensus_Kozak, hPAH_codop_ORF_v2, PacI_site, WPRE_3pUTR, bGH, spacer_right-ITR_v1, right-ITR_v1

[0344] According to some embodiments, the ceDNA construct comprises left-ITR_v1, spacer_left-ITR_v2.1, VD_PromoterSet, PmeI_site, Mod_Minimum_Consensus_Kozak, hPAH_codop_ORF_v2, PacI_site, HBBv2_3pUTR, SV40_polyA, spacer_right-ITR_v1, right-ITR_v1. According to some embodiments, the ceDNA construct consists of left-ITR_v1, spacer_left-ITR_v2.1, VD_PromoterSet, PmeI_site, Mod_Minimum_Consensus_Kozak, hPAH_codop_ORF_v2, PacI_site, HBBv2_3pUTR, SV40_polyA, spacer_right-ITR_v1, right-ITR_v1.

[0345] According to some embodiments, the ceDNA construct comprises left-ITR_v1, spacer_left-ITR_v2.1, VD_PromoterSet, PmeI_site, Mod_Minimum_Consensus_Kozak, hPAH_codop_ORF_v2, PacI_site, HBBv3_3pUTR, SV40_polyA, spacer_right-ITR_v1, right-ITR_v1. According to some embodiments, the ceDNA construct consists of left-ITR_v1, spacer_left-ITR_v2.1, VD_PromoterSet, PmeI_site, Mod_Minimum_Consensus_Kozak, hPAH_codop_ORF_v2, PacI_site, HBBv3_3pUTR, SV40_polyA, spacer_right-ITR_v1, right-ITR_v1.

[0346] According to some embodiments, the ceDNA construct comprises left-ITR_v1, spacer_left-ITR_v2.1, VD_PromoterSet, PmeI_site, Mod_Minimum_Consensus_Kozak, hPAH_codop_ORF_v2, PacI_site, WPRE_3pUTR, SV40_polyA, spacer_right-ITR_v1, right-ITR_v1. According to some embodiments, the ceDNA construct consists of left-ITR_v1, spacer_left-ITR_v2.1, VD_PromoterSet, PmeI_site, Mod_Minimum_Consensus_Kozak, hPAH_codop_ORF_v2, PacI_site, WPRE_3pUTR, SV40_polyA, spacer_right-ITR_v1, right-ITR_v1.

[0347] According to some embodiments, the ceDNA construct comprises left-ITR_v1, spacer_left-ITR_v2.1, VD_PromoterSet, PmeI_site, Mod_Minimum_Consensus_Kozak, hPAH_codop_ORF_v2, PacI_site, WPRE_3pUTR, HBBv2_3pUTR, spacer_right-ITR_v1, right-ITR_v1. According to some embodiments, the ceDNA construct consists of left-ITR_v1, spacer_left-ITR_v2.1, VD_PromoterSet, PmeI_site, Mod_Minimum_Consensus_Kozak, hPAH_codop_ORF_v2, PacI_site, WPRE_3pUTR, HBBv2_3pUTR, spacer_right-ITR_v1, right-ITR_v1.

[0348] According to some embodiments, the ceDNA construct comprises left-ITR_v1, spacer_left-ITR_v2.1, 3×HNFI-4_ProEnh_10mer, BamHI_site, TTR_liver_specific_Promoter, MVM_intron, PmeI_site, Mod_Minimum_Consensus_Kozak, hPAH_codop_ORF_v2, PacI_site, WPRE_3pUTR, bGH, spacer_right-ITR_v1, right-ITR_v1. According to some embodiments, the ceDNA construct consists of left-ITR_v1, spacer_left-ITR_v2.1, 3×HNFI-4_ProEnh_10mer, BamHI_site, TTR_liver_specific_Promoter, MVM_intron, PmeI_site, Mod_Minimum_Consensus_Kozak, hPAH_codop_ORF_v2, PacI_site, WPRE_3pUTR, bGH, spacer_right-ITR_v1, right-ITR_v1.

[0349] According to some embodiments, the ceDNA construct comprises left-ITR_v1, spacer_left-ITR_v2.1, 3×HNF1-4_ProEnh_10mer, HS-CRM8_SERP_Enhancer_nospacer, HS-CRM8_SERP_Enhancer_nospacer, BamHI_site, TTR_liver_specific_Promoter, MVM_intron, PmeI_site, Mod_Minimum_Consensus_Kozak, hPAH_codop_ORF_v2, PacI_site, WPRE_3pUTR, bGH, spacer_right-ITR_v1, right-ITR_v1. According to some embodiments, the ceDNA construct consists of left-ITR_v1, spacer_left-ITR_v2.1, 3×HNFI-4_ProEnh_10mer, HS-CRM8_SERP_Enhancer_nospacer, HS-CRM8_SERP_Enhancer_nospacer, BamHI_site, TTR_liver_specific_Promoter, MVM_intron, PmeI_site, Mod_Minimum_Consensus_Kozak, hPAH_codop_ORF_v2, PacI_site, WPRE_3pUTR, bGH, spacer_right-ITR_v1, right-ITR_v1.

[0350] According to some embodiments, the ceDNA construct comprises left-ITR_v1, spacer_left-ITR_v2.1, CpGfree20mer_1, 5×HNF1_ProEnh_10mer, BamHI_site, TTR_liver_specific_Promoter, MVM_intron, PmeI_site, Mod_Minimum_Consensus_Kozak, hPAH_codop_ORF_v2, PacI_site, WPRE_3pUTR, bGH, spacer_right-ITR_v1, right-ITR_v1. According to some embodiments, the ceDNA construct consists of left-ITR_v1, spacer_left-ITR_v2.1, CpGfree20mer_1, 5×HNF1_ProEnh_10mer, BamHI_site, TTR_liver_specific_Promoter, MVM_intron, PmeI_site, Mod_Minimum_Consensus_Kozak, hPAH_codop_ORF_v2, PacI_site, WPRE_3pUTR, bGH, spacer_right-ITR_v1, right-ITR_v1.

[0351] According to some embodiments, the ceDNA construct comprises left-ITR_v1, spacer_left-ITR_v2.1, CpGfree20mer_1, 5×HNFI_ProEnh_10mer, 3×VanD_TTRe_PromoterSet_v2, PmeI_site, Mod_Minimum_Consensus_Kozak, hPAH_codop_ORF_v2, PacI_site, WPRE_3pUTR, bGH, spacer_right-ITR_v1, right-ITR_v1. According to some embodiments, the ceDNA construct consists of left-ITR_v1, spacer_left-ITR_v2.1, CpGfree20mer_1, 5×HNFI_ProEnh_10mer, 3×VanD_TTRe_PromoterSet_v2, PmeI_site, Mod_Minimum_Consensus_Kozak, hPAH_codop_ORF_v2, PacI_site, WPRE_3pUTR, bGH, spacer_right-ITR_v1, right-ITR_v1.

[0352] According to some embodiments, the ceDNA construct comprises left-ITR_v1, spacer_left-ITR_v2.1, 3×VanD_TTRe_PromoterSet_v2, PmeI_site, Mod_Minimum_Consensus_Kozak, hPAH_codop_ORF_v2, PacI_site, WPRE_3pUTR, bGH, spacer_right-ITR_v1, right-ITR_v1. According to some embodiments, the ceDNA construct consists of left-ITR_v1, spacer_left-ITR_v2.1, 3×VanD_TTRe_PromoterSet_v2, PmeI_site, Mod_Minimum_Consensus_Kozak, hPAH_codop_ORF_v2, PacI_site, WPRE_3pUTR, bGH, spacer_right-ITR_v1, right-ITR_v1.

[0353] According to some embodiments, the ceDNA construct comprises left-ITR_v1, spacer_left-ITR_v2.1, CpGmin_hAAT_Promoter_Set, PmeI_site, Mod_Minimum_Consensus_Kozak, hPAH_codop_ORF_v2, PacI_site, WPRE_3pUTR, bGH, spacer_right-ITR_v1, right-ITR_v1. According to some embodiments, the ceDNA construct consists of left-ITR_v1, spacer_left-ITR_v2.1, CpGmin_hAAT_Promoter_Set, PmeI_site, Mod_Minimum_Consensus_Kozak, hPAH_codop_ORF_v2, PacI_site, WPRE_3pUTR, bGH, spacer_right-ITR_v1, right-ITR_v1.

[0354] According to some embodiments, the ceDNA construct comprises left-ITR_v1, spacer_left-ITR_v2, HS-CRM8_SERP_Enhancer_nospacer, HS-CRM8_SERP_Enhancer_nospacer, HS-CRM8_SERP_Enhancer_nospacer, BamHI_site, TTR-promoter-d5pUTR, MVM_intron, PmeI_site, Mod_Minimum_Consensus_Kozak, hPAH-r3-s34, PacI_site, WPRE_3pUTR, bGH, spacer_right-ITR_v1, right-ITR_v1. According to some embodiments, the ceDNA construct consists of left-ITR_v1, spacer_left-ITR_v2, HS-CRM8_SERP_Enhancer_nospacer, HS-CRM8_SERP_Enhancer_nospacer, HS-CRM8_SERP_Enhancer_nospacer, BamHI_site, TTR-promoter-d5pUTR, MVM_intron, PmeI_site, Mod_Minimum_Consensus_Kozak, hPAH-r3-s34, PacI_site, WPRE_3pUTR, bGH, spacer_right-ITR_v1, right-ITR_v1.

[0355] According to some embodiments, the ceDNA construct comprises left-ITR_v1, spacer_left-ITR_v2, HS-CRM8_SERP_Enhancer_nospacer, HS-CRM8_SERP_Enhancer_nospacer, HS-CRM8_SERP_Enhancer_nospacer, BamHI_site, TTR-promoter-d5pUTR, MVM_intron, PmeI_site, Mod_Minimum_Consensus_Kozak, hPAH-r5-s29, PacI_site, WPRE_3pUTR, bGH, spacer_right-ITR_v1, right-ITR_v1. According to some embodiments, the ceDNA construct consists of left-ITR_v1, spacer_left-ITR_v2, HS-CRM8_SERP_Enhancer_nospacer, HS-CRM8_SERP_Enhancer_nospacer, HS-CRM8_SERP_Enhancer_nospacer, BamHI_site, TTR-promoter-d5pUTR, MVM_intron, PmeI_site, Mod_Minimum_Consensus_Kozak, hPAH-r5-s29, PacI_site, WPRE_3pUTR, bGH, spacer_right-ITR_v1, right-ITR_v1.

[0356] According to some embodiments, the ceDNA construct comprises a nucleic acid sequence that is at least 90% identical to a sequence selected from the group consisting of: SEQ ID NO: 194, SEQ ID NO: 195, SEQ ID NO: 196, SEQ ID NO: 197, SEQ ID NO: 198, SEQ ID NO: 199, SEQ ID NO: 200, SEQ ID NO: 201, SEQ ID NO: 202, SEQ ID NO: 203, SEQ ID NO: 204, SEQ ID NO: 205, SEQ ID NO: 206, SEQ ID NO: 207, SEQ ID NO: 208, SEQ ID NO: 209, SEQ ID NO: 210, SEQ ID NO: 211, SEQ ID NO: 212, and SEQ ID NO: 213.

### D. Regulatory Switches

[0357] A molecular regulatory switch is one which generates a measurable change in state in response to a signal. Such regulatory switches can be usefully combined with the ceDNA vectors for expression of PAH protein as described herein to control the output of expression of PAH protein from the ceDNA vector. In some embodiments, the ceDNA vector for expression of PAH protein comprises a regulatory switch that serves to fine tune expression of the PAH protein. For example, it can serve as a biocontainment function of the ceDNA vector. In some embodiments, the switch is an “ON/OFF” switch that is designed to start or stop (i.e., shut down) expression of PAH protein in the ceDNA vector in a controllable and regulatable fashion. In some embodiments, the switch can include a “kill switch” that can instruct the cell comprising the ceDNA vector to undergo cell programmed death once the switch is activated. Exemplary regulatory switches encompassed for use in a ceDNA vector for expression of PAH protein can be used to regulate the expression of a transgene, and are more fully discussed in International application PCT/US18/49996, which is incorporated herein in its entirety by reference.

[0358] (i) Binary Regulatory Switches

[0359] In some embodiments, the ceDNA vector for expression of PAH protein comprises a regulatory switch that can serve to controllably modulate expression of PAH protein. For example, the expression cassette located between the ITRs of the ceDNA vector may additionally comprise a regulatory region, e.g., a promoter, cis-element, repressor, enhancer etc., that is operatively linked to the nucleic acid sequence encoding PAH protein, where the regulatory region is regulated by one or more cofactors or exogenous agents. By way of example only, regulatory regions can be modulated by small molecule switches or inducible or repressible promoters. Non-limiting examples of inducible promoters are hormone-inducible or metal-inducible promoters. Other exemplary inducible promoters/enhancer elements include, but are not limited to, an RU486-inducible promoter, an ecdysone-inducible promoter, a rapamycin-inducible promoter, and a metallothionein promoter.

[0360] (ii) Small molecule Regulatory Switches

[0361] A variety of art-known small-molecule based regulatory switches are known in the art and can be combined with the ceDNA vectors for expression of PAH protein as disclosed herein to form a regulatory-switch controlled ceDNA vector. In some embodiments, the regulatory switch can be selected from any one or a combination of: an orthogonal ligand/nuclear receptor pair, for example retinoid receptor variant/LG335 and GRQCIMFI, along with an artificial promoter controlling expression of the operatively linked transgene, such as that as disclosed in Taylor, et al. BMC Biotechnology 10 (2010): 15; engineered steroid receptors, e.g., modified progesterone receptor with a C-terminal truncation that cannot bind progesterone but binds RU486 (mifepristone) (U.S. Pat. No. 5,364,791); an ecdysone receptor from Drosophila and their ecdysteroid ligands (Saez, et al., PNAS, 97(26)(2000), 14512-14517; or a switch controlled by the antibiotic trimethoprim (TMP), as disclosed in Sando R 3^{rd}; Nat Methods. 2013, 10(11):1085-8. In some embodiments, the regulatory switch to control the transgene or expressed by the ceDNA vector is a pro-drug activation switch, such as that disclosed in U.S. Pat. Nos. 8,771,679, and 6,339,070, incorporated by reference in their entireties herein.

[0362] (iii) “Passcode” Regulatory Switches

[0363] In some embodiments the regulatory switch can be a “passcode switch” or “passcode circuit”. Passcode switches allow fine tuning of the control of the expression of the transgene from the ceDNA vector when specific conditions occur—that is, a combination of conditions need to be present for transgene expression and/or repression to occur. For example, for expression of a transgene to occur at least conditions A and B must occur. A passcode regulatory switch can be any number of conditions, e.g., at least 2, or at least 3, or at least 4, or at least 5, or at least 6 or at least 7 or more conditions to be present for transgene expression to occur. In some embodiments, at least 2 conditions (e.g., A, B conditions) need to occur, and in some embodiments, at least 3 conditions need to occur (e.g., A, B and C, or A, B and D). By way of an example only, for gene expression from a ceDNA to occur that has a passcode “ABC” regulatory switch, conditions A, B and C must be present. Conditions A, B and C could be as follows; condition A is the presence of a condition or disease, condition B is a hormonal response, and condition C is a response to the transgene expression. For example, if the transgene edits a defective EPO gene, Condition A is the presence of Chronic Kidney Disease (CKD), Condition B occurs if the subject has hypoxic conditions in the kidney, Condition C is that Erythropoietin-producing cells (EPC) recruitment in the kidney is impaired; or alternatively, HIF-2 activation is impaired. Once the oxygen levels increase or the desired level of EPO is reached, the transgene turns off again until 3 conditions occur, turning it back on.

[0364] In some embodiments, a passcode regulatory switch or “Passcode circuit” encompassed for use in the ceDNA vector comprises hybrid transcription factors (TFs) to expand the range and complexity of environmental signals used to define biocontainment conditions. As opposed to a deadman switch which triggers cell death in the presence of a predetermined condition, the “passcode circuit” allows cell survival or transgene expression in the presence of a particular “passcode”, and can be easily reprogrammed to allow transgene expression and/or cell survival only when the predetermined environmental condition or passcode is present.

[0365] Any and all combinations of regulatory switches disclosed herein, e.g., small molecule switches, nucleic acid-based switches, small molecule-nucleic acid hybrid switches, post-transcriptional transgene regulation switches, post-translational regulation, radiation-controlled switches, hypoxia-mediated switches and other regulatory switches known by persons of ordinary skill in the art as disclosed herein can be used in a passcode regulatory switch as disclosed herein. Regulatory switches encompassed for use are also discussed in the review article Kis et al., J R Soc Interface. 12: 20141000 (2015), and summarized in Table 1 of Kis. In some embodiments, a regulatory switch for use in a passcode system can be selected from any or a combination of the switches disclosed in Table 11 of International Patent Application No. PCT/US18/49996, which is incorporated herein in its entirety by reference.

[0366] (iv) Nucleic Acid-Based Regulatory Switches to Control Transgene Expression

[0367] In some embodiments, the regulatory switch to control the expression of PAH protein by the ceDNA is based on a nucleic-acid based control mechanism. Exemplary nucleic acid control mechanisms are known in the art and are envisioned for use. For example, such mechanisms include riboswitches, such as those disclosed in, e.g., US2009/0305253, US2008/0269258, US2017/0204477, WO2018026762A1, U.S. Pat. No. 9,222,093 and EP application EP288071, and also disclosed in the review by Villa J K et al., Microbiol Spectr. 2018 May; 6(3). Also included are metabolite-responsive transcription biosensors, such as those disclosed in WO2018/075486 and WO2017/147585. Other art-known mechanisms envisioned for use include silencing of the transgene with an siRNA or RNAi molecule (e.g., miR, shRNA). For example, the ceDNA vector can comprise a regulatory switch that encodes a RNAi molecule that is complementary to the part of the transgene expressed by the ceDNA vector. When such RNAi is expressed even if the transgene (e.g., PAH protein) is expressed by the ceDNA vector, it will be silenced by the complementary RNAi molecule, and when the RNAi is not expressed when the transgene is expressed by the ceDNA vector the transgene (e.g., PAH protein) is not silenced by the RNAi.

[0368] In some embodiments, the regulatory switch is a tissue-specific self-inactivating regulatory switch, for example as disclosed in US2002/0022018, whereby the regulatory switch deliberately switches transgene (e.g., PAH protein) off at a site where transgene expression might otherwise be disadvantageous. In some embodiments, the regulatory switch is a recombinase reversible gene expression system, for example as disclosed in US2014/0127162 and U.S. Pat. No. 8,324,436.

[0369] (v) Post-Transcriptional and Post-Translational Regulatory Switches.

[0370] In some embodiments, the regulatory switch to control the expression of PAH protein by the ceDNA vector is a post-transcriptional modification system. For example, such a regulatory switch can be an aptazyme riboswitch that is sensitive to tetracycline or theophylline, as disclosed in US2018/0119156, GB201107768, WO2001/064956A3, EP Patent 2707487 and Beilstein et al., ACS Synth. Biol., 2015, 4 (5), pp 526-534; Zhong et al., Elife. 2016 Nov. 2; 5. pii: e18858. In some embodiments, it is envisioned that a person of ordinary skill in the art could encode both the transgene and an inhibitory siRNA which contains a ligand sensitive (OFF-switch) aptamer, the net result being a ligand sensitive ON-switch.

[0371] (vi) Other Exemplary Regulatory Switches

[0372] Any known regulatory switch can be used in the ceDNA vector to control the expression of PAH protein by the ceDNA vector, including those triggered by environmental changes. Additional examples include, but are not limited to; the BOC method of Suzuki et al., Scientific Reports 8; 10051 (2018); genetic code expansion and a non-physiologic amino acid; radiation-controlled or ultra-sound controlled on/off switches (see, e.g., Scott S et al., Gene Ther. 2000 July; 7(13):1121-5; U.S. Pat. Nos. 5,612,318; 5,571,797; 5,770,581; 5,817,636; and WO1999/025385A1. In some embodiments, the regulatory switch is controlled by an implantable system, e.g., as disclosed in U.S. Pat. No. 7,840,263; US2007/0190028A1 where gene expression is controlled by one or more forms of energy, including electromagnetic energy, that activates promoters operatively linked to the transgene in the ceDNA vector.

[0373] In some embodiments, a regulatory switch envisioned for use in the ceDNA vector is a hypoxia-mediated or stress-activated switch, e.g., such as those disclosed in WO1999060142A2, U.S. Pat. Nos. 5,834,306; 6,218,179; 6,709,858; US2015/0322410; Greco et al., (2004) Targeted Cancer Therapies 9, S368, incorporated by reference in their entireties herein, as well as FROG, TOAD and NRSE elements and conditionally inducible silence elements, including hypoxia response elements (HREs), inflammatory response elements (IREs) and shear-stress activated elements (SSAEs), e.g., as disclosed in U.S. Pat. No. 9,394,526, incorporated by reference in its entirety herein. Such an embodiment is useful for turning on expression of the transgene from the ceDNA vector after ischemia or in ischemic tissues, and/or tumors.

[0374] (vii) Kill Switches

[0375] Other embodiments described herein relate to a ceDNA vector for expression of PAH protein as described herein comprising a kill switch. A kill switch as disclosed herein enables a cell comprising the ceDNA vector to be killed or undergo programmed cell death as a means to permanently remove an introduced ceDNA vector from the subject's system. It will be appreciated by one of ordinary skill in the art that use of kill switches in the ceDNA vectors for expression of PAH protein would be typically coupled with targeting of the ceDNA vector to a limited number of cells that the subject can acceptably lose or to a cell type where apoptosis is desirable (e.g., cancer cells). In all aspects, a “kill switch” as disclosed herein is designed to provide rapid and robust cell killing of the cell comprising the ceDNA vector in the absence of an input survival signal or other specified condition. Stated another way, a kill switch encoded by a ceDNA vector for expression of PAH protein as described herein can restrict cell survival of a cell comprising a ceDNA vector to an environment defined by specific input signals. Such kill switches serve as a biological biocontainment function should it be desirable to remove the ceDNA vector e expression of PAH protein in a subject or to ensure that it will not express the encoded PAH protein.

[0376] Other kill switches known to a person of ordinary skill in the art are encompassed for use in the ceDNA vector for expression of PAH protein as disclosed herein, e.g., as disclosed in US2010/0175141; US2013/0009799; US2011/0172826; US2013/0109568, as well as kill switches disclosed in Jusiak et al, Reviews in Cell Biology and molecular Medicine; 2014; 1-56; Kobayashi et al., PNAS, 2004; 101; 8419-9; Marchisio et al., Int. Journal of Biochem and Cell Biol., 2011; 43; 310-319; and in Reinshagen et al., Science Translational Medicine, 2018, 11, the contents of all of which are incorporated by reference in their entireties herein.

[0377] Accordingly, in some embodiments, the ceDNA vector for expression of PAH protein can comprise a kill switch nucleic acid construct, which comprises the nucleic acid encoding an effector toxin or reporter protein, where the expression of the effector toxin (e.g., a death protein) or reporter protein is controlled by a predetermined condition. For example, a predetermined condition can be the presence of an environmental agent, such as, e.g., an exogenous agent, without which the cell will default to expression of the effector toxin (e.g., a death protein) and be killed. In alternative embodiments, a predetermined condition is the presence of two or more environmental agents, e.g., the cell will only survive when two or more necessary exogenous agents are supplied, and without either of which, the cell comprising the ceDNA vector is killed.

[0378] In some embodiments, the ceDNA vector for expression of PAH protein is modified to incorporate a kill-switch to destroy the cells comprising the ceDNA vector to effectively terminate the in vivo expression of the transgene being expressed by the ceDNA vector (e.g., expression of PAH protein). Specifically, the ceDNA vector is further genetically engineered to express a switch-protein that is not functional in mammalian cells under normal physiological conditions. Only upon administration of a drug or environmental condition that specifically targets this switch-protein, the cells expressing the switch-protein will be destroyed thereby terminating the expression of the therapeutic protein or peptide. For instance, it was reported that cells expressing HSV-thymidine kinase can be killed upon administration of drugs, such as ganciclovir and cytosine deaminase. See, for example, Dey and Evans, Suicide Gene Therapy by Herpes Simplex Virus-1 Thymidine Kinase (HSV-TK), in Targets in Gene Therapy, edited by You (2011); and Beltinger et al., Proc. Natl. Acad. Sci. USA 96(15):8699-8704 (1999). In some embodiments the ceDNA vector can comprise a siRNA kill switch referred to as DISE (Death Induced by Survival gene Elimination) (Murmann et al., Oncotarget. 2017; 8:84643-84658. Induction of DISE in ovarian cancer cells in vivo).

### VI. Method of Production of a ceDNA Vector

### General Methods of Production

[0379] Certain methods for the production of a ceDNA vector for expression of PAH protein comprising an asymmetrical ITR pair or symmetrical ITR pair as defined herein is described in section IV of International application PCT/US18/49996 filed Sep. 7, 2018, which is incorporated herein in its entirety by reference. In some embodiments, a ceDNA vector for expression of PAH protein as disclosed herein can be produced using insect cells, as described herein. In alternative embodiments, a ceDNA vector for expression of PAH protein as disclosed herein can be produced synthetically and in some embodiments, in a cell-free method, as disclosed on International Application PCT/US19/14122, filed Jan. 18, 2019, which is incorporated herein in its entirety by reference.

[0380] As described herein, in one embodiment, a ceDNA vector for expression of PAH protein can be obtained, for example, by the process comprising the steps of: a) incubating a population of host cells (e.g. insect cells) harboring the polynucleotide expression construct template (e.g., a ceDNA-plasmid, a ceDNA-Bacmid, and/or a ceDNA-baculovirus), which is devoid of viral capsid coding sequences, in the presence of a Rep protein under conditions effective and for a time sufficient to induce production of the ceDNA vector within the host cells, and wherein the host cells do not comprise viral capsid coding sequences; and b) harvesting and isolating the ceDNA vector from the host cells. The presence of Rep protein induces replication of the vector polynucleotide with a modified ITR to produce the ceDNA vector in a host cell. However, no viral particles (e.g. AAV virions) are expressed. Thus, there is no size limitation such as that naturally imposed in AAV or other viral-based vectors.

[0381] The presence of the ceDNA vector isolated from the host cells can be confirmed by digesting DNA isolated from the host cell with a restriction enzyme having a single recognition site on the ceDNA vector and analyzing the digested DNA material on a non-denaturing gel to confirm the presence of characteristic bands of linear and continuous DNA as compared to linear and non-continuous DNA.

[0382] In yet another aspect, the disclosure provides for use of host cell lines that have stably integrated the DNA vector polynucleotide expression template (ceDNA template) into their own genome in production of the non-viral DNA vector, e.g., as described in Lee, L. et al. (2013) Plos One 8(8): e69879. Preferably, Rep is added to host cells at an MOI of about 3. When the host cell line is a mammalian cell line, e.g., HEK293 cells, the cell lines can have polynucleotide vector template stably integrated, and a second vector such as herpes virus can be used to introduce Rep protein into cells, allowing for the excision and amplification of ceDNA in the presence of Rep and helper virus.

[0383] In one embodiment, the host cells used to make the ceDNA vectors for expression of PAH protein as described herein are insect cells, and baculovirus is used to deliver both the polynucleotide that encodes Rep protein and the non-viral DNA vector polynucleotide expression construct template for ceDNA, e.g., as described in FIGS. 3A-3C and Example 1. In some embodiments, the host cell is engineered to express Rep protein.

[0384] The ceDNA vector is then harvested and isolated from the host cells. The time for harvesting and collecting ceDNA vectors described herein from the cells can be selected and optimized to achieve a high-yield production of the ceDNA vectors. For example, the harvest time can be selected in view of cell viability, cell morphology, cell growth, etc. In one embodiment, cells are grown under sufficient conditions and harvested a sufficient time after baculoviral infection to produce ceDNA vectors but before a majority of cells start to die because of the baculoviral toxicity. The DNA vectors can be isolated using plasmid purification kits such as Qiagen Endo-Free Plasmid kits. Other methods developed for plasmid isolation can be also adapted for DNA vectors. Generally, any nucleic acid purification methods can be adopted.

[0385] The DNA vectors can be purified by any means known to those of skill in the art for purification of DNA. In one embodiment, ceDNA vectors are purified as DNA molecules. In another embodiment, the ceDNA vectors are purified as exosomes or microparticles.

[0386] The presence of the ceDNA vector for expression of PAH protein can be confirmed by digesting the vector DNA isolated from the cells with a restriction enzyme having a single recognition site on the DNA vector and analyzing both digested and undigested DNA material using gel electrophoresis to confirm the presence of characteristic bands of linear and continuous DNA as compared to linear and non-continuous DNA. FIG. 3C and FIG. 3D illustrate one embodiment for identifying the presence of the closed ended ceDNA vectors produced by the processes herein.

### VII. Pharmaceutical Compositions

[0387] In another aspect, pharmaceutical compositions are provided. The pharmaceutical composition comprises a ceDNA vector for expression of PAH protein as described herein and a pharmaceutically acceptable carrier or diluent.

[0388] The ceDNA vectors for expression of PAH protein as disclosed herein can be incorporated into pharmaceutical compositions suitable for administration to a subject for in vivo delivery to cells, tissues, or organs of the subject. Typically, the pharmaceutical composition comprises a ceDNA-vector as disclosed herein and a pharmaceutically acceptable carrier. For example, the ceDNA vectors for expression of PAH protein as described herein can be incorporated into a pharmaceutical composition suitable for a desired route of therapeutic administration (e.g., parenteral administration). Passive tissue transduction via high pressure intravenous or intra-arterial infusion, as well as intracellular injection, such as intranuclear microinjection or intracytoplasmic injection, are also contemplated. Pharmaceutical compositions for therapeutic purposes can be formulated as a solution, microemulsion, dispersion, liposomes, or other ordered structure suitable to high ceDNA vector concentration. Sterile injectable solutions can be prepared by incorporating the ceDNA vector compound in the required amount in an appropriate buffer with one or a combination of ingredients enumerated above, as required, followed by filtered sterilization including a ceDNA vector can be formulated to deliver a transgene in the nucleic acid to the cells of a recipient, resulting in the therapeutic expression of the transgene or donor sequence therein. The composition can also include a pharmaceutically acceptable carrier.

[0389] Pharmaceutically active compositions comprising a ceDNA vector for expression of PAH protein can be formulated to deliver a transgene for various purposes to the cell, e.g., cells of a subject.

[0390] Pharmaceutical compositions for therapeutic purposes typically must be sterile and stable under the conditions of manufacture and storage. The composition can be formulated as a solution, microemulsion, dispersion, liposomes, or other ordered structure suitable to high ceDNA vector concentration. Sterile injectable solutions can be prepared by incorporating the ceDNA vector compound in the required amount in an appropriate buffer with one or a combination of ingredients enumerated above, as required, followed by filtered sterilization.

[0391] A ceDNA vector for expression of PAH protein as disclosed herein can be incorporated into a pharmaceutical composition suitable for topical, systemic, intra-amniotic, intrathecal, intracranial, intra-arterial, intravenous, intralymphatic, intraperitoneal, subcutaneous, tracheal, intra-tissue (e.g., intramuscular, intracardiac, intrahepatic, intrarenal, intracerebral), intrathecal, intravesical, conjunctival (e.g., extra-orbital, intraorbital, retroorbital, intraretinal, subretinal, choroidal, sub-choroidal, intrastromal, intracameral and intravitreal), intracochlear, and mucosal (e.g., oral, rectal, nasal) administration. Passive tissue transduction via high pressure intravenous or intraarterial infusion, as well as intracellular injection, such as intranuclear microinjection or intracytoplasmic injection, are also contemplated.

[0392] In some aspects, the methods provided herein comprise delivering one or more ceDNA vectors for expression of PAH protein as disclosed herein to a host cell. Also provided herein are cells produced by such methods, and organisms (such as animals, plants, or fungi) comprising or produced from such cells. Methods of delivery of nucleic acids can include lipofection, nucleofection, microinjection, biolistics, liposomes, immunoliposomes, polycation or lipid:nucleic acid conjugates, naked DNA, and agent-enhanced uptake of DNA. Lipofection is described in e.g., U.S. Pat. Nos. 5,049,386, 4,946,787; and 4,897,355, incorporated by reference in their entireties herein) and lipofection reagents are sold commercially (e.g., Transfectam™ and Lipofectin™). Delivery can be to cells (e.g., in vitro or ex vivo administration) or target tissues (e.g., in vivo administration).

[0393] Various techniques and methods are known in the art for delivering nucleic acids to cells. For example, nucleic acids, such as ceDNA for expression of PAH protein can be formulated into lipid nanoparticles (LNPs), lipidoids, liposomes, lipid nanoparticles, lipoplexes, or core-shell nanoparticles. Typically, LNPs are composed of nucleic acid (e.g., ceDNA) molecules, one or more ionizable or cationic lipids (or salts thereof), one or more non-ionic or neutral lipids (e.g., a phospholipid), a molecule that prevents aggregation (e.g., PEG or a PEG-lipid conjugate), and optionally a sterol (e.g., cholesterol).

[0394] Another method for delivering nucleic acids, such as ceDNA for expression of PAH protein to a cell is by conjugating the nucleic acid with a ligand that is internalized by the cell. For example, the ligand can bind a receptor on the cell surface and internalized via endocytosis. The ligand can be covalently linked to a nucleotide in the nucleic acid. Exemplary conjugates for delivering nucleic acids into a cell are described, example, in International Patent Application Publication Nos. WO2015/006740, WO2014/025805, WO2012/037254, WO2009/082606, WO2009/073809, WO2009/018332, WO2006/112872, WO2004/090108, WO2004/091515 and WO2017/177326, the contents of all of which are incorporated by reference in their entireties herein.

[0395] Nucleic acids, such as ceDNA vectors for expression of PAH protein can also be delivered to a cell by transfection. Useful transfection methods include, but are not limited to, lipid-mediated transfection, cationic polymer-mediated transfection, or calcium phosphate precipitation. Transfection reagents are well known in the art and include, but are not limited to, TurboFect Transfection Reagent (Thermo Fisher Scientific), Pro-Ject Reagent (Thermo Fisher Scientific), TRANSPASS™ P Protein Transfection Reagent (New England Biolabs), CHARIOT™ Protein Delivery Reagent (Active Motif), PROTEOJUICE™ Protein Transfection Reagent (EMD Millipore), 293fectin, LIPOFECTAMINE™ 2000, LIPOFECTAMINE™ 3000 (Thermo Fisher Scientific), LIPOFECTAMINE™ (Thermo Fisher Scientific), LIPOFECTIN™ (Thermo Fisher Scientific), DMRIE-C, CELLFECTIN™ (Thermo Fisher Scientific), OLIGOFECTAMINE™ (Thermo Fisher Scientific), LIPOFECTACE™, FUGENE™ (Roche, Basel, Switzerland), FUGENE™ HD (Roche), TRANSFECTAM™ (Transfectam, Promega, Madison, Wis.), TFX-10™ (Promega), TFX-20™ (Promega), TFX-50™ (Promega), TRANSFECTIN™ (BioRad, Hercules, Calif.), SILENTFECT™ (Bio-Rad), Effectene™ (Qiagen, Valencia, Calif.), DC-chol (Avanti Polar Lipids), GENEPORTER™ (Gene Therapy Systems, San Diego, Calif.), DHARMAFECT 1™ (Dharmacon, Lafayette, Colo.), DHARMAFECT 2™ (Dharmacon), DHARMAFECT 3™ (Dharmacon), DHARMAFECT 4™ (Dharmacon), ESCORT™ III (Sigma, St. Louis, Mo.), and ESCORT™ IV (Sigma Chemical Co.). Nucleic acids, such as ceDNA, can also be delivered to a cell via microfluidics methods known to those of skill in the art.

[0396] ceDNA vectors for expression of PAH protein as described herein can also be administered directly to an organism for transduction of cells in vivo. Administration is by any of the routes normally used for introducing a molecule into ultimate contact with blood or tissue cells including, but not limited to, injection, infusion, topical application and electroporation. Suitable methods of administering such nucleic acids are available and well known to those of skill in the art, and, although more than one route can be used to administer a particular composition, a particular route can often provide a more immediate and more effective reaction than another route.

[0397] Methods for introduction of a nucleic acid vector ceDNA vector for expression of PAH protein as disclosed herein can be delivered into hematopoietic stem cells, for example, by the methods as described, for example, in U.S. Pat. No. 5,928,638, incorporated by reference in its entirety herein.

[0398] The ceDNA vectors for expression of PAH protein in accordance with the present disclosure can be added to liposomes for delivery to a cell or target organ in a subject. Liposomes are vesicles that possess at least one lipid bilayer. Liposomes are typical used as carriers for drug/therapeutic delivery in the context of pharmaceutical development. They work by fusing with a cellular membrane and repositioning its lipid structure to deliver a drug or active pharmaceutical ingredient (API). Liposome compositions for such delivery are composed of phospholipids, especially compounds having a phosphatidylcholine group, however these compositions may also include other lipids. Exemplary liposomes and liposome formulations, including but not limited to polyethylene glycol (PEG)-functional group containing compounds are disclosed in International Application PCT/US2018/050042, filed on Sep. 7, 2018 and in International application PCT/US2018/064242, filed on Dec. 6, 2018, e.g., see the section entitled “Pharmaceutical Formulations”, the contents of each of which are incorporated by reference in their entireties herein.

[0399] Various delivery methods known in the art or modification thereof can be used to deliver ceDNA vectors in vitro or in vivo. For example, in some embodiments, ceDNA vectors for expression of PAH protein are delivered by making transient penetration in cell membrane by mechanical, electrical, ultrasonic, hydrodynamic, or laser-based energy so that DNA entrance into the targeted cells is facilitated. For example, a ceDNA vector can be delivered by transiently disrupting cell membrane by squeezing the cell through a size-restricted channel or by other means known in the art. In some cases, a ceDNA vector alone is directly injected as naked DNA into any one of: any one or more tissues selected from: liver, kidneys, gallbladder, prostate, adrenal gland, heart, intestine, lung, and stomach, skin, thymus, cardiac muscle or skeletal muscle. In some cases, a ceDNA vector is delivered by gene gun. Gold or tungsten spherical particles (1-3 m diameter) coated with capsid-free AAV vectors can be accelerated to high speed by pressurized gas to penetrate into target tissue cells.

[0400] Compositions comprising a ceDNA vector for expression of PAH protein and a pharmaceutically acceptable carrier are specifically contemplated herein. In some embodiments, the ceDNA vector is formulated with a lipid delivery system, for example, liposomes as described herein. In some embodiments, such compositions are administered by any route desired by a skilled practitioner. The compositions may be administered to a subject by different routes including orally, parenterally, sublingually, transdermally, rectally, transmucosally, topically, via inhalation, via buccal administration, intrapleurally, intravenous, intra-arterial, intraperitoneal, subcutaneous, intramuscular, intranasal intrathecal, and intraarticular or combinations thereof. For veterinary use, the composition may be administered as a suitably acceptable formulation in accordance with normal veterinary practice. The veterinarian may readily determine the dosing regimen and route of administration that is most appropriate for a particular animal. The compositions may be administered by traditional syringes, needleless injection devices, “microprojectile bombardment gene guns”, or other physical methods such as electroporation (“EP”), hydrodynamic methods, or ultrasound.

[0401] In some cases, a ceDNA vector for expression of PAH protein is delivered by hydrodynamic injection, which is a simple and highly efficient method for direct intracellular delivery of any water-soluble compounds and particles into internal organs and skeletal muscle in an entire limb.

[0402] In some cases, ceDNA vectors for expression of PAH protein are delivered by ultrasound by making nanoscopic pores in membrane to facilitate intracellular delivery of DNA particles into cells of internal organs or tumors, so the size and concentration of plasmid DNA have great role in efficiency of the system. In some cases, ceDNA vectors are delivered by magnetofection by using magnetic fields to concentrate particles containing nucleic acid into the target cells.

[0403] In some cases, chemical delivery systems can be used, for example, by using nanomeric complexes, which include compaction of negatively charged nucleic acid by polycationic nanomeric particles, belonging to cationic liposome/micelle or cationic polymers. Cationic lipids used for the delivery method includes, but not limited to monovalent cationic lipids, polyvalent cationic lipids, guanidine containing compounds, cholesterol derivative compounds, cationic polymers, (e.g., poly(ethylenimine), poly-L-lysine, protamine, other cationic polymers), and lipid-polymer hybrid.

### A. Exosomes:

[0404] In some embodiments, a ceDNA vector for expression of PAH protein as disclosed herein is delivered by being packaged in an exosome. Exosomes are small membrane vesicles of endocytic origin that are released into the extracellular environment following fusion of multivesicular bodies with the plasma membrane. Their surface consists of a lipid bilayer from the donor cell's cell membrane, they contain cytosol from the cell that produced the exosome, and exhibit membrane proteins from the parental cell on the surface. Exosomes are produced by various cell types including epithelial cells, B and T lymphocytes, mast cells (MC) as well as dendritic cells (DC). Some embodiments, exosomes with a diameter between 10 nm and 1 m, between 20 nm and 500 nm, between 30 nm and 250 nm, between 50 nm and 100 nm are envisioned for use. Exosomes can be isolated for a delivery to target cells using either their donor cells or by introducing specific nucleic acids into them. Various approaches known in the art can be used to produce exosomes containing capsid-free AAV vectors of the present disclosure.

### A. Microparticle/Nanoparticles

[0405] In some embodiments, a ceDNA vector for expression of PAH protein as disclosed herein is delivered by a lipid nanoparticle. Generally, lipid nanoparticles comprise an ionizable amino lipid (e.g., heptatriaconta-6,9,28,31-tetraen-19-yl 4-(dimethylamino)butanoate, DLin-MC3-DMA, a phosphatidylcholine (1,2-distearoyl-sn-glycero-3-phosphocholine, DSPC), cholesterol and a coat lipid (polyethylene glycol-dimyristolglycerol, PEG-DMG), for example as disclosed by Tam et al. (2013). Advances in Lipid Nanoparticles for siRNA delivery. Pharmaceuticals 5(3): 498-507.

[0406] In some embodiments, a lipid nanoparticle has a mean diameter between about 10 and about 1000 nm. In some embodiments, a lipid nanoparticle has a diameter that is less than 300 nm. In some embodiments, a lipid nanoparticle has a diameter between about 10 and about 300 nm. In some embodiments, a lipid nanoparticle has a diameter that is less than 200 nm. In some embodiments, a lipid nanoparticle has a diameter between about 25 and about 200 nm. In some embodiments, a lipid nanoparticle preparation (e.g., composition comprising a plurality of lipid nanoparticles) has a size distribution in which the mean size (e.g., diameter) is about 70 nm to about 200 nm, and more typically the mean size is about 100 nm or less.

[0407] Various lipid nanoparticles known in the art can be used to deliver ceDNA vector for expression of PAH protein as disclosed herein. For example, various delivery methods using lipid nanoparticles are described in U.S. Pat. Nos. 9,404,127, 9,006,417 and 9,518,272.

[0408] In some embodiments, a ceDNA vector for expression of PAH protein as disclosed herein is delivered by a gold nanoparticle. Generally, a nucleic acid can be covalently bound to a gold nanoparticle or non-covalently bound to a gold nanoparticle (e.g., bound by a charge-charge interaction), for example as described by Ding et al. (2014). Gold Nanoparticles for Nucleic Acid Delivery. Mol. Ther. 22(6); 1075-1083. In some embodiments, gold nanoparticle-nucleic acid conjugates are produced using methods described, for example, in U.S. Pat. No. 6,812,334.

### B. Conjugates

[0409] In some embodiments, a ceDNA vector for expression of PAH protein as disclosed herein is conjugated (e.g., covalently bound to an agent that increases cellular uptake. An “agent that increases cellular uptake” is a molecule that facilitates transport of a nucleic acid across a lipid membrane. For example, a nucleic acid can be conjugated to a lipophilic compound (e.g., cholesterol, tocopherol, etc.), a cell penetrating peptide (CPP) (e.g., penetratin, TAT, Syn1B, etc.), and polyamines (e.g., spermine). Further examples of agents that increase cellular uptake are disclosed, for example, in Winkler (2013). Oligonucleotide conjugates for therapeutic applications. Ther. Deliv. 4(7); 791-809.

[0410] In some embodiments, a ceDNA vector for expression of PAH protein as disclosed herein is conjugated to a polymer (e.g., a polymeric molecule) or a folate molecule (e.g., folic acid molecule). Generally, delivery of nucleic acids conjugated to polymers is known in the art, for example as described in WO2000/34343 and WO2008/022309. In some embodiments, a ceDNA vector for expression of PAH protein as disclosed herein is conjugated to a poly(amide) polymer, for example as described by U.S. Pat. No. 8,987,377. In some embodiments, a nucleic acid described by the disclosure is conjugated to a folic acid molecule as described in U.S. Pat. No. 8,507,455.

[0411] In some embodiments, a ceDNA vector for expression of PAH protein as disclosed herein is conjugated to a carbohydrate, for example as described in U.S. Pat. No. 8,450,467.

### C. Nanocapsule

[0412] Alternatively, nanocapsule formulations of a ceDNA vector for expression of PAH protein as disclosed herein can be used. Nanocapsules can generally entrap substances in a stable and reproducible way. To avoid side effects due to intracellular polymeric overloading, such ultrafine particles (sized around 0.1 μm) should be designed using polymers able to be degraded in vivo. Biodegradable polyalkyl-cyanoacrylate nanoparticles that meet these requirements are contemplated for use.

### D. Liposomes

[0413] The ceDNA vectors for expression of PAH protein in accordance with the present disclosure can be added to liposomes for delivery to a cell or target organ in a subject. Liposomes are vesicles that possess at least one lipid bilayer. Liposomes are typical used as carriers for drug/therapeutic delivery in the context of pharmaceutical development. They work by fusing with a cellular membrane and repositioning its lipid structure to deliver a drug or active pharmaceutical ingredient (API). Liposome compositions for such delivery are composed of phospholipids, especially compounds having a phosphatidylcholine group, however these compositions may also include other lipids.

[0414] The formation and use of liposomes is generally known to those of skill in the art. Liposomes have been developed with improved serum stability and circulation half-times (U.S. Pat. No. 5,741,516). Further, various methods of liposome and liposome like preparations as potential drug carriers have been described (U.S. Pat. Nos. 5,567,434; 5,552,157; 5,565,213; 5,738,868 and 5,795,587, incorporated by reference in their entireties herein).

### E. Exemplary Liposome and Lipid Nanoparticle (LNP) Compositions

[0415] The ceDNA vectors for expression of PAH protein in accordance with the present disclosure can be added to liposomes for delivery to a cell, e.g., a cell in need of expression of the transgene. Liposomes are vesicles that possess at least one lipid bilayer. Liposomes are typical used as carriers for drug/therapeutic delivery in the context of pharmaceutical development. They work by fusing with a cellular membrane and repositioning its lipid structure to deliver a drug or active pharmaceutical ingredient (API). Liposome compositions for such delivery are composed of phospholipids, especially compounds having a phosphatidylcholine group, however these compositions may also include other lipids.

[0416] Lipid nanoparticles (LNPs) comprising ceDNA vectors are disclosed in International Application PCT/US2018/050042, filed on Sep. 7, 2018, and International Application PCT/US2018/064242, filed on Dec. 6, 2018 which are incorporated herein in their entirety and envisioned for use in the methods and compositions for ceDNA vectors for expression of PAH protein as disclosed herein.

[0417] In some aspects, the disclosure provides for a liposome formulation that includes one or more compounds with a polyethylene glycol (PEG) functional group (so-called “PEG-ylated compounds”) which can reduce the immunogenicity/antigenicity of, provide hydrophilicity and hydrophobicity to the compound(s) and reduce dosage frequency. Or the liposome formulation simply includes polyethylene glycol (PEG) polymer as an additional component. In such aspects, the molecular weight of the PEG or PEG functional group can be from 62 Da to about 5,000 Da.

[0418] In some aspects, the disclosure provides for a liposome formulation that will deliver an API with extended release or controlled release profile over a period of hours to weeks. In some related aspects, the liposome formulation may comprise aqueous chambers that are bound by lipid bilayers. In other related aspects, the liposome formulation encapsulates an API with components that undergo a physical transition at elevated temperature which releases the API over a period of hours to weeks.

[0419] In some aspects, the liposome formulation comprises sphingomyelin and one or more lipids disclosed herein. In some aspects, the liposome formulation comprises optisomes.

[0420] In some aspects, the disclosure provides for a liposome formulation that includes one or more lipids selected from: N-(carbonyl-methoxypolyethylene glycol 2000)-1,2-distearoyl-sn-glycero-3-phosphoethanolamine sodium salt, (distearoyl-sn-glycero-phosphoethanolamine), MPEG (methoxy polyethylene glycol)-conjugated lipid, HSPC (hydrogenated soy phosphatidylcholine); PEG (polyethylene glycol); DSPE (distearoyl-sn-glycero-phosphoethanolamine); DSPC (distearoylphosphatidylcholine); DOPC (dioleoylphosphatidylcholine); DPPG (dipalmitoylphosphatidylglycerol); EPC (egg phosphatidylcholine); DOPS (dioleoylphosphatidylserine); POPC (palmitoyloleoylphosphatidylcholine); SM (sphingomyelin); MPEG (methoxy polyethylene glycol); DMPC (dimyristoyl phosphatidylcholine); DMPG (dimyristoyl phosphatidylglycerol); DSPG (distearoylphosphatidylglycerol); DEPC (dierucoylphosphatidylcholine); DOPE (dioleoly-sn-glycero-phophoethanolamine). cholesteryl sulphate (CS), dipalmitoylphosphatidylglycerol (DPPG), DOPC (dioleoly-sn-glycero-phosphatidylcholine) or any combination thereof.

[0421] In some aspects, the disclosure provides for a liposome formulation comprising phospholipid, cholesterol and a PEG-ylated lipid in a molar ratio of 56:38:5. In some aspects, the liposome formulation's overall lipid content is from 2-16 mg/mL. In some aspects, the disclosure provides for a liposome formulation comprising a lipid containing a phosphatidylcholine functional group, a lipid containing an ethanolamine functional group and a PEG-ylated lipid. In some aspects, the disclosure provides for a liposome formulation comprising a lipid containing a phosphatidylcholine functional group, a lipid containing an ethanolamine functional group and a PEG-ylated lipid in a molar ratio of 3:0.015:2 respectively. In some aspects, the disclosure provides for a liposome formulation comprising a lipid containing a phosphatidylcholine functional group, cholesterol and a PEG-ylated lipid. In some aspects, the disclosure provides for a liposome formulation comprising a lipid containing a phosphatidylcholine functional group and cholesterol. In some aspects, the PEG-ylated lipid is PEG-2000-DSPE. In some aspects, the disclosure provides for a liposome formulation comprising DPPG, soy PC, MPEG-DSPE lipid conjugate and cholesterol.

[0422] In some aspects, the disclosure provides for a liposome formulation comprising one or more lipids containing a phosphatidylcholine functional group and one or more lipids containing an ethanolamine functional group. In some aspects, the disclosure provides for a liposome formulation comprising one or more: lipids containing a phosphatidylcholine functional group, lipids containing an ethanolamine functional group, and sterols, e.g. cholesterol. In some aspects, the liposome formulation comprises DOPC/DEPC; and DOPE.

[0423] In some aspects, the disclosure provides for a liposome formulation further comprising one or more pharmaceutical excipients, e.g. sucrose and/or glycine.

[0424] In some aspects, the disclosure provides for a liposome formulation that is either unilamellar or multilamellar in structure. In some aspects, the disclosure provides for a liposome formulation that comprises multi-vesicular particles and/or foam-based particles. In some aspects, the disclosure provides for a liposome formulation that are larger in relative size to common nanoparticles and about 150 to 250 nm in size. In some aspects, the liposome formulation is a lyophilized powder.

[0425] In some aspects, the disclosure provides for a liposome formulation that is made and loaded with ceDNA vectors disclosed or described herein, by adding a weak base to a mixture having the isolated ceDNA outside the liposome. This addition increases the pH outside the liposomes to approximately 7.3 and drives the API into the liposome. In some aspects, the disclosure provides for a liposome formulation having a pH that is acidic on the inside of the liposome. In such cases the inside of the liposome can be at pH 4-6.9, and more preferably pH 6.5. In other aspects, the disclosure provides for a liposome formulation made by using intra-liposomal drug stabilization technology. In such cases, polymeric or non-polymeric highly charged anions and intra-liposomal trapping agents are utilized, e.g. polyphosphate or sucrose octasulfate.

[0426] In some aspects, the disclosure provides for a lipid nanoparticle comprising ceDNA and an ionizable lipid. For example, a lipid nanoparticle formulation that is made and loaded with ceDNA obtained by the process as disclosed in International Application PCT/US2018/050042, filed on Sep. 7, 2018, which is incorporated herein. This can be accomplished by high energy mixing of ethanolic lipids with aqueous ceDNA at low pH which protonates the ionizable lipid and provides favorable energetics for ceDNA/lipid association and nucleation of particles. The particles can be further stabilized through aqueous dilution and removal of the organic solvent. The particles can be concentrated to the desired level.

[0427] Generally, the lipid particles are prepared at a total lipid to ceDNA (mass or weight) ratio of from about 10:1 to 30:1. In some embodiments, the lipid to ceDNA ratio (mass/mass ratio; w/w ratio) can be in the range of from about 1:1 to about 25:1, from about 10:1 to about 14:1, from about 3:1 to about 15:1, from about 4:1 to about 10:1, from about 5:1 to about 9:1, or about 6:1 to about 9:1. The amounts of lipids and ceDNA can be adjusted to provide a desired N/P ratio, for example, N/P ratio of 3, 4, 5, 6, 7, 8, 9, 10 or higher. Generally, the lipid particle formulation's overall lipid content can range from about 5 mg/ml to about 30 mg/mL.

[0428] The ionizable lipid is typically employed to condense the nucleic acid cargo, e.g., ceDNA at low pH and to drive membrane association and fusogenicity. Generally, ionizable lipids are lipids comprising at least one amino group that is positively charged or becomes protonated under acidic conditions, for example at pH of 6.5 or lower. Ionizable lipids are also referred to as cationic lipids herein.

[0429] Exemplary ionizable lipids are described in International Patent Publication Nos. WO2015/095340, WO2015/199952, WO2018/011633, WO2017/049245, WO2015/061467, WO2012/040184, WO2012/000104, WO2015/074085, WO2016/081029, WO2017/004143, WO2017/075531, WO2017/117528, WO2011/022460, WO2013/148541, WO2013/116126, WO2011/153120, WO2012/044638, WO2012/054365, WO2011/090965, WO2013/016058, WO2012/162210, WO2008/042973, WO2010/129709, WO2010/144740, WO2012/099755, WO2013/049328, WO2013/086322, WO2013/086373, WO2011/071860, WO2009/132131, WO2010/048536, WO2010/088537, WO2010/054401, WO2010/054406, WO2010/054405, WO2010/054384, WO2012/016184, WO2009/086558, WO2010/042877, WO2011/000106, WO2011/000107, WO2005/120152, WO2011/141705, WO2013/126803, WO2006/007712, WO2011/038160, WO2005/121348, WO2011/066651, WO2009/127060, WO2011/141704, WO2006/069782, WO2012/031043, WO2013/006825, WO2013/033563, WO2013/089151, WO2017/099823, WO2015/095346, and WO2013/086354, and US Patent Publication Nos. US2016/0311759, US2015/0376115, US2016/0151284, US2017/0210697, US2015/0140070, US2013/0178541, US2013/0303587, US2015/0141678, US2015/0239926, US2016/0376224, US2017/0119904, US2012/0149894, US2015/0057373, US2013/0090372, US2013/0274523, US2013/0274504, US2013/0274504, US2009/0023673, US2012/0128760, US2010/0324120, US2014/0200257, US2015/0203446, US2018/0005363, US2014/0308304, US2013/0338210, US2012/0101148, US2012/0027796, US2012/0058144, US2013/0323269, US2011/0117125, US2011/0256175, US2012/0202871, US2011/0076335, US2006/0083780, US2013/0123338, US2015/0064242, US2006/0051405, US2013/0065939, US2006/0008910, US2003/0022649, US2010/0130588, US2013/0116307, US2010/0062967, US2013/0202684, US2014/0141070, US2014/0255472, US2014/0039032, US2018/0028664, US2016/0317458, and US2013/0195920, the contents of all of which are incorporated herein by reference in their entireties.

[0430] In some embodiments, the ionizable lipid is MC3 (6Z,9Z,28Z,31Z)-heptatriaconta-6,9,28,31-tetraen-19-yl-4-(dimethylamino) butanoate (DLin-MC3-DMA or MC3) having the following structure:

[chemical structure]

[0431] The lipid DLin-MC3-DMA is described in Jayaraman et al., Angew. Chem. Int. Ed Engl. (2012), 51(34): 8529-8533, content of which is incorporated herein by reference in its entirety.

[0432] In some embodiments, the ionizable lipid is the lipid ATX-002 as described in WO2015/074085, content of which is incorporated herein by reference in its entirety.

[0433] In some embodiments, the ionizable lipid is (13Z,16Z)-N,N-dimethyl-3-nonyldocosa-13,16-dien-1-amine (Compound 32), as described in International Patent Application Publication No. WO2012/040184, content of which is incorporated herein by reference in its entirety.

[0434] In some embodiments, the ionizable lipid is Compound 6 or Compound 22 as described in International Patent Application Publication No. WO2015/199952, content of which is incorporated herein by reference in its entirety.

[0435] Without limitations, ionizable lipid can comprise 20-90% (mol) of the total lipid present in the lipid nanoparticle. For example, ionizable lipid molar content can be 20-70% (mol), 30-60% (mol) or 40-50% (mol) of the total lipid present in the lipid nanoparticle. In some embodiments, ionizable lipid comprises from about 50 mol % to about 90 mol % of the total lipid present in the lipid nanoparticle.

[0436] In some aspects, the lipid nanoparticle can further comprise a non-cationic lipid. Non-ionic lipids include amphipathic lipids, neutral lipids and anionic lipids. Accordingly, the non-cationic lipid can be a neutral uncharged, zwitterionic, or anionic lipid. Non-cationic lipids are typically employed to enhance fusogenicity.

[0437] Exemplary non-cationic lipids envisioned for use in the methods and compositions as disclosed herein are described in International Patent Application Nos. PCT/US2018/050042, filed on Sep. 7, 2018, and PCT/US2018/064242, filed on Dec. 6, 2018 which are each incorporated herein in its entirety. Exemplary non-cationic lipids are described in International Application Publication No. WO2017/099823 and US Patent Publication No. US2018/0028664, the contents of both of which are incorporated herein by reference in their entirety.

[0438] The non-cationic lipid can comprise 0-30% (mol) of the total lipid present in the lipid nanoparticle. For example, the non-cationic lipid content is 5-20% (mol) or 10-15% (mol) of the total lipid present in the lipid nanoparticle. In various embodiments, the molar ratio of ionizable lipid to the neutral lipid ranges from about 2:1 to about 8:1.

[0439] In some embodiments, the lipid nanoparticles do not comprise any phospholipids. In some aspects, the lipid nanoparticle can further comprise a component, such as a sterol, to provide membrane integrity.

[0440] One exemplary sterol that can be used in the lipid nanoparticle is cholesterol and derivatives thereof. Exemplary cholesterol derivatives are described in International Patent Application Publication No. WO2009/127060 and US Patent Application Publication No. US2010/0130588, contents of both of which are incorporated herein by reference in their entirety.

[0441] The component providing membrane integrity, such as a sterol, can comprise 0-50% (mol) of the total lipid present in the lipid nanoparticle. In some embodiments, such a component is 20-50% (mol) 30-40% (mol) of the total lipid content of the lipid nanoparticle.

[0442] In some aspects, the lipid nanoparticle can further comprise a polyethylene glycol (PEG) or a conjugated lipid molecule. Generally, these are used to inhibit aggregation of lipid nanoparticles and/or provide steric stabilization. Exemplary conjugated lipids include, but are not limited to, PEG-lipid conjugates, polyoxazoline (POZ)-lipid conjugates, polyamide-lipid conjugates (such as ATTA-lipid conjugates), cationic-polymer lipid (CPL) conjugates, and mixtures thereof. In some embodiments, the conjugated lipid molecule is a PEG-lipid conjugate, for example, a (methoxy polyethylene glycol)-conjugated lipid. Exemplary PEG-lipid conjugates include, but are not limited to, PEG-diacylglycerol (DAG) (such as 1-(monomethoxy-polyethyleneglycol)-2,3-dimyristoylglycerol (PEG-DMG)), PEG-dialkyloxypropyl (DAA), PEG-phospholipid, PEG-ceramide (Cer), a pegylated phosphatidylethanoloamine (PEG-PE), PEG succinate diacylglycerol (PEGS-DAG) (such as 4-O-(2′,3′-di(tetradecanoyloxy)propyl-1-O-(w-methoxy(polyethoxy)ethyl) butanedioate (PEG-S-DMG)), PEG dialkoxypropylcarbam, N-(carbonyl-methoxypolyethylene glycol 2000)-1,2-distearoyl-sn-glycero-3-phosphoethanolamine sodium salt, or a mixture thereof. Additional exemplary PEG-lipid conjugates are described, for example, in US Patent Nos. or Patent Application Publication Nos. U.S. Pat. Nos. 5,885,613, 6,287,591, US2003/0077829, US2003/0077829, US2005/0175682, US2008/0020058, US2011/0117125, US2010/0130588, US2016/0376224, and US2017/0119904, the contents of all of which are incorporated herein by reference in their entirety.

[0443] In some embodiments, a PEG-lipid is a compound as defined in Patent Application Publication No. US2018/0028664, the content of which is incorporated herein by reference in its entirety. In some embodiments, a PEG-lipid is disclosed in Patent Application Publication Nos. US2015/0376115 or US2016/0376224, the content of both of which is incorporated herein by reference in its entirety.

[0444] The PEG-DAA conjugate can be, for example, PEG-dilauryloxypropyl, PEG-dimyristyloxypropyl, PEG-dipalmityloxypropyl, or PEG-distearyloxypropyl. The PEG-lipid can be one or more of PEG-DMG, PEG-dilaurylglycerol, PEG-dipalmitoylglycerol, PEG-disterylglycerol, PEG-dilaurylglycamide, PEG-dimyristylglycamide, PEG-dipalmitoylglycamide, PEG-disterylglycamide, PEG-cholesterol (1-[8′-(Cholest-5-en-3[beta]-oxy)carboxamido-3′,6′-dioxaoctanyl]carbamoyl-[omega]-methyl-poly(ethylene glycol), PEG-DMB (3,4-Ditetradecoxylbenzyl-[omega]-methyl-poly(ethylene glycol) ether), and 1,2-dimyristoyl-sn-glycero-3-phosphoethanolamine-N-[methoxy(polyethylene glycol)-2000]. In some examples, the PEG-lipid can be selected from the group consisting of PEG-DMG, 1,2-dimyristoyl-sn-glycero-3-phosphoethanolamine-N-[methoxy(polyethylene glycol)-2000],

[0445] Lipids conjugated with a molecule other than a PEG can also be used in place of PEG-lipid. For example, polyoxazoline (POZ)-lipid conjugates, polyamide-lipid conjugates (such as ATTA-lipid conjugates), and cationic-polymer lipid (CPL) conjugates can be used in place of or in addition to the PEG-lipid. Exemplary conjugated lipids, i.e., PEG-lipids, (POZ)-lipid conjugates, ATTA-lipid conjugates and cationic polymer-lipids are described in the International Patent Application Publication Nos. WO1996/010392, WO1998/051278, WO2002/087541, WO2005/026372, WO2008/147438, WO2009/086558, WO2012/000104, WO2017/117528, WO2017/099823, WO2015/199952, WO2017/004143, WO2015/095346, WO2012/000104, WO2012/000104, and WO2010/006282, US Patent Application Publication Nos. US2003/0077829, US2005/0175682, US2008/0020058, US2011/0117125, US2013/0303587, US2018/0028664, US2015/0376115, US2016/0376224, US2016/0317458, US2013/0303587, US2013/0303587, and US20110123453, and U.S. Pat. Nos. 5,885,613, 6,287,591, 6,320,017, and 6,586,559, the contents of all of which are incorporated herein by reference in their entireties.

[0446] In some embodiments, the one or more additional compound can be a therapeutic agent. The therapeutic agent can be selected from any class suitable for the therapeutic objective. In other words, the therapeutic agent can be selected from any class suitable for the therapeutic objective. In other words, the therapeutic agent can be selected according to the treatment objective and biological action desired. For example, if the ceDNA within the LNP is useful for treating PKU, the additional compound can be an anti-PKU agent (e.g., a chemotherapeutic agent, or other PKU therapy (including, but not limited to, a small molecule or an antibody). In another example, if the LNP containing the ceDNA is useful for treating an infection, the additional compound can be an antimicrobial agent (e.g., an antibiotic or antiviral compound). In yet another example, if the LNP containing the ceDNA is useful for treating an immune disease or disorder, the additional compound can be a compound that modulates an immune response (e.g., an immunosuppressant, immunostimulatory compound, or compound modulating one or more specific immune pathways). In some embodiments, different cocktails of different lipid nanoparticles containing different compounds, such as a ceDNA encoding a different protein or a different compound, such as a therapeutic may be used in the compositions and methods of the disclosure.

[0447] In some embodiments, the additional compound is an immune modulating agent. For example, the additional compound is an immunosuppressant. In some embodiments, the additional compound is immune stimulatory agent. Also provided herein is a pharmaceutical composition comprising the lipid nanoparticle-encapsulated insect-cell produced, or a synthetically produced ceDNA vector for expression of PAH protein as described herein and a pharmaceutically acceptable carrier or excipient.

[0448] In some aspects, the disclosure provides for a lipid nanoparticle formulation further comprising one or more pharmaceutical excipients. In some embodiments, the lipid nanoparticle formulation further comprises sucrose, tris, trehalose and/or glycine.

[0449] The ceDNA vector can be complexed with the lipid portion of the particle or encapsulated in the lipid position of the lipid nanoparticle. In some embodiments, the ceDNA can be fully encapsulated in the lipid position of the lipid nanoparticle, thereby protecting it from degradation by a nuclease, e.g., in an aqueous solution. In some embodiments, the ceDNA in the lipid nanoparticle is not substantially degraded after exposure of the lipid nanoparticle to a nuclease at 37° C. for at least about 20, 30, 45, or 60 minutes. In some embodiments, the ceDNA in the lipid nanoparticle is not substantially degraded after incubation of the particle in serum at 37° C. for at least about 30, 45, or 60 minutes or at least about 2, 3, 4, 5, 6, 7, 8, 9, 10, 12, 14, 16, 18, 20, 22, 24, 26, 28, 30, 32, 34, or 36 hours.

[0450] In certain embodiments, the lipid nanoparticles are substantially non-toxic to a subject, e.g., to a mammal such as a human. In some aspects, the lipid nanoparticle formulation is a lyophilized powder.

[0451] In some embodiments, lipid nanoparticles are solid core particles that possess at least one lipid bilayer. In other embodiments, the lipid nanoparticles have a non-bilayer structure, i.e., a non-lamellar (i.e., non-bilayer) morphology. Without limitations, the non-bilayer morphology can include, for example, three dimensional tubes, rods, cubic symmetries, etc. For example, the morphology of the lipid nanoparticles (lamellar vs. non-lamellar) can readily be assessed and characterized using, e.g., Cryo-TEM analysis as described in US2010/0130588, the content of which is incorporated herein by reference in its entirety.

[0452] In some further embodiments, the lipid nanoparticles having a non-lamellar morphology are electron dense. In some aspects, the disclosure provides for a lipid nanoparticle that is either unilamellar or multilamellar in structure. In some aspects, the disclosure provides for a lipid nanoparticle formulation that comprises multi-vesicular particles and/or foam-based particles.

[0453] By controlling the composition and concentration of the lipid components, one can control the rate at which the lipid conjugate exchanges out of the lipid particle and, in turn, the rate at which the lipid nanoparticle becomes fusogenic. In addition, other variables including, e.g., pH, temperature, or ionic strength, can be used to vary and/or control the rate at which the lipid nanoparticle becomes fusogenic. Other methods which can be used to control the rate at which the lipid nanoparticle becomes fusogenic will be apparent to those of ordinary skill in the art based on this disclosure. It will also be apparent that by controlling the composition and concentration of the lipid conjugate, one can control the lipid particle size.

[0454] The pKa of formulated cationic lipids can be correlated with the effectiveness of the LNPs for delivery of nucleic acids (see Jayaraman et al, Angewandte Chemie, International Edition (2012), 51(34), 8529-8533; Semple et al, Nature Biotechnology 28, 172-176 (2010), both of which are incorporated by reference in their entirety). The preferred range of pKa is ˜5 to ˜7. The pKa of the cationic lipid can be determined in lipid nanoparticles using an assay based on fluorescence of 2-(p-toluidino)-6-napthalene sulfonic acid (TNS).

### VIII. Methods of Use

[0455] A ceDNA vector for expression of PAH protein as disclosed herein can also be used in a method for the delivery of a nucleic acid sequence of interest (e.g., encoding PAH protein) to a target cell (e.g., a host cell). The method may in particular be a method for delivering PAH protein to a cell of a subject in need thereof and treating PKU. The disclosure allows for the in vivo expression of PAH protein encoded in the ceDNA vector in a cell in a subject such that therapeutic effect of the expression of PAH protein occurs. These results are seen with both in vivo and in vitro modes of ceDNA vector delivery.

[0456] In addition, the disclosure provides a method for the delivery of PAH protein in a cell of a subject in need thereof, comprising multiple administrations of the ceDNA vector of the disclosure encoding said PAH protein. Since the ceDNA vector of the disclosure does not induce an immune response like that typically observed against encapsidated viral vectors, such a multiple administration strategy will likely have greater success in a ceDNA-based system. The ceDNA vector are administered in sufficient amounts to transfect the cells of a desired tissue and to provide sufficient levels of gene transfer and expression of the PAH protein without undue adverse effects. Conventional and pharmaceutically acceptable routes of administration include, but are not limited to, retinal administration (e.g., subretinal injection, suprachoroidal injection or intravitreal injection), intravenous (e.g., in a liposome formulation), direct delivery to the selected organ (e.g., any one or more tissues selected from: liver, kidneys, gallbladder, prostate, adrenal gland, heart, intestine, lung, and stomach), intramuscular, and other parental routes of administration. Routes of administration may be combined, if desired.

[0457] Delivery of a ceDNA vector for expression of PAH protein as described herein is not limited to delivery of the expressed PAH protein. For example, conventionally produced (e.g., using a cell-based production method (e.g., insect-cell production methods) or synthetically produced ceDNA vectors as described herein may be used with other delivery systems provided to provide a portion of the gene therapy. One non-limiting example of a system that may be combined with the ceDNA vectors in accordance with the present disclosure includes systems which separately deliver one or more co-factors or immune suppressors for effective gene expression of the ceDNA vector expressing the PAH protein.

[0458] The disclosure also provides for a method of treating PKU in a subject comprising introducing into a target cell in need thereof (in particular a muscle cell or tissue) of the subject a therapeutically effective amount of a ceDNA vector, optionally with a pharmaceutically acceptable carrier. While the ceDNA vector can be introduced in the presence of a carrier, such a carrier is not required. The ceDNA vector selected comprises a nucleic acid sequence encoding an PAH protein useful for treating PKU. In particular, the ceDNA vector may comprise a desired PAH protein sequence operably linked to control elements capable of directing transcription of the desired PAH protein encoded by the exogenous DNA sequence when introduced into the subject. The ceDNA vector can be administered via any suitable route as provided above, and elsewhere herein.

[0459] The compositions and vectors provided herein can be used to deliver an PAH protein for various purposes. In some embodiments, the transgene encodes an PAH protein that is intended to be used for research purposes, e.g., to create a somatic transgenic animal model harboring the transgene, e.g., to study the function of the PAH protein product. In another example, the transgene encodes an PAH protein that is intended to be used to create an animal model of PKU. In some embodiments, the encoded PAH protein is useful for the treatment or prevention of PKU states in a mammalian subject. The PAH protein can be transferred (e.g., expressed in) to a patient in a sufficient amount to treat PKU associated with reduced expression, lack of expression or dysfunction of the gene.

[0460] In principle, the expression cassette can include a nucleic acid or any transgene that encodes an PAH protein that is either reduced or absent due to a mutation or which conveys a therapeutic benefit when overexpressed is considered to be within the scope of the disclosure. Preferably, noninserted bacterial DNA is not present and preferably no bacterial DNA is present in the ceDNA compositions provided herein.

[0461] A ceDNA vector is not limited to one species of ceDNA vector. As such, in another aspect, multiple ceDNA vectors expressing different proteins or the same PAH protein but operatively linked to different promoters or cis-regulatory elements can be delivered simultaneously or sequentially to the target cell, tissue, organ, or subject. Therefore, this strategy can allow for the gene therapy or gene delivery of multiple proteins simultaneously. It is also possible to separate different portions of a PAH protein into separate ceDNA vectors (e.g., different domains and/or co-factors required for functionality of a PAH protein) which can be administered simultaneously or at different times, and can be separately regulatable, thereby adding an additional level of control of expression of a PAH protein. Delivery can also be performed multiple times and, importantly for gene therapy in the clinical setting, in subsequent increasing or decreasing doses, given the lack of an anti-capsid host immune response due to the absence of a viral capsid. It is anticipated that no anti-capsid response will occur as there is no capsid.

[0462] The disclosure also provides for a method of treating PKU in a subject comprising introducing into a target cell in need thereof (in particular a muscle cell or tissue) of the subject a therapeutically effective amount of a ceDNA vector as disclosed herein, optionally with a pharmaceutically acceptable carrier. While the ceDNA vector can be introduced in the presence of a carrier, such a carrier is not required. The ceDNA vector implemented comprises a nucleic acid sequence of interest useful for treating the PKU. In particular, the ceDNA vector may comprise a desired exogenous DNA sequence operably linked to control elements capable of directing transcription of the desired polypeptide, protein, or oligonucleotide encoded by the exogenous DNA sequence when introduced into the subject. The ceDNA vector can be administered via any suitable route as provided above, and elsewhere herein.

### IX. Methods of Delivering ceDNA Vectors for PAH Protein Production

[0463] In some embodiments, a ceDNA vector for expression of PAH protein can be delivered to a target cell in vitro or in vivo by various suitable methods. ceDNA vectors alone can be applied or injected. CeDNA vectors can be delivered to a cell without the help of a transfection reagent or other physical means. Alternatively, ceDNA vectors for expression of PAH protein can be delivered using any art-known transfection reagent or other art-known physical means that facilitates entry of DNA into a cell, e.g., liposomes, alcohols, polylysine-rich compounds, arginine-rich compounds, calcium phosphate, microvesicles, microinjection, electroporation and the like.

[0464] The ceDNA vectors for expression of PAH protein as disclosed herein can efficiently target cell and tissue-types that are normally difficult to transduce with conventional AAV virions using various delivery reagent.

[0465] One aspect of the technology described herein relates to a method of delivering an PAH protein to a cell. Typically, for in vivo and in vitro methods, a ceDNA vector for expression of PAH protein as disclosed herein may be introduced into the cell using the methods as disclosed herein, as well as other methods known in the art. A ceDNA vector for expression of PAH protein as disclosed herein are preferably administered to the cell in a biologically-effective amount. If the ceDNA vector is administered to a cell in vivo (e.g., to a subject), a biologically-effective amount of the ceDNA vector is an amount that is sufficient to result in transduction and expression of the PAH protein in a target cell.

[0466] Exemplary modes of administration of a ceDNA vector for expression of PAH protein as disclosed herein includes oral, rectal, transmucosal, intranasal, inhalation (e.g., via an aerosol), buccal (e.g., sublingual), vaginal, intrathecal, intraocular, transdermal, intraendothelial, in utero (or in ovo), parenteral (e.g., intravenous, subcutaneous, intradermal, intracranial, intramuscular [including administration to skeletal, diaphragm and/or cardiac muscle], intrapleural, intracerebral, and intraarticular). Administration can be systemically or direct delivery to the liver or elsewhere (e.g., any kidneys, gallbladder, prostate, adrenal gland, heart, intestine, lung, and stomach).

[0467] Administration can be topical (e.g., to both skin and mucosal surfaces, including airway surfaces, and transdermal administration), intralymphatic, and the like, as well as direct tissue or organ injection (e.g., but not limited to, liver, but also to eye, muscles, including skeletal muscle, cardiac muscle, diaphragm muscle, or brain).

[0468] Administration of the ceDNA vector can be to any site in a subject, including, without limitation, a site selected from the group consisting of the liver and/or also eyes, brain, a skeletal muscle, a smooth muscle, the heart, the diaphragm, the airway epithelium, the kidney, the spleen, the pancreas, the skin.

[0469] The most suitable route in any given case will depend on the nature and severity of the condition being treated, ameliorated, and/or prevented and on the nature of the particular ceDNA vector that is being used. Additionally, ceDNA permits one to administer more than one PAH protein in a single vector, or multiple ceDNA vectors (e.g. a ceDNA cocktail).

A. Intramuscular Administration of a ceDNA Vector

[0470] In some embodiments, a method of treating a disease in a subject comprises introducing into a target cell in need thereof (in particular a muscle cell or tissue) of the subject a therapeutically effective amount of a ceDNA vector encoding an PAH protein, optionally with a pharmaceutically acceptable carrier. In some embodiments, the ceDNA vector for expression of PAH protein is administered to a muscle tissue of a subject.

[0471] In some embodiments, administration of the ceDNA vector can be to any site in a subject, including, without limitation, a site selected from the group consisting of a skeletal muscle, a smooth muscle, the heart, the diaphragm, or muscles of the eye.

[0472] Administration of a ceDNA vector for expression of PAH protein as disclosed herein to a skeletal muscle according to the present disclosure includes but is not limited to administration to the skeletal muscle in the limbs (e.g., upper arm, lower arm, upper leg, and/or lower leg), back, neck, head (e.g., tongue), thorax, abdomen, pelvis/perineum, and/or digits. The ceDNA as disclosed herein vector can be delivered to skeletal muscle by intravenous administration, intra-arterial administration, intraperitoneal administration, limb perfusion, (optionally, isolated limb perfusion of a leg and/or arm; see, e.g. Arruda et al., (2005) Blood 105: 3458-3464), and/or direct intramuscular injection. In particular embodiments, the ceDNA vector as disclosed herein is administered to the liver, eye, a limb (arm and/or leg) of a subject (e.g., a subject with muscular dystrophy such as DMD) by limb perfusion, optionally isolated limb perfusion (e.g., by intravenous or intra-articular administration. In embodiments, the ceDNA vector as disclosed herein can be administered without employing “hydrodynamic” techniques.

[0473] For instance, tissue delivery (e.g., to retina) of conventional viral vectors is often enhanced by hydrodynamic techniques (e.g., intravenous/intravenous administration in a large volume), which increase pressure in the vasculature and facilitate the ability of the viral vector to cross the endothelial cell barrier. In particular embodiments, the ceDNA vectors described herein can be administered in the absence of hydrodynamic techniques such as high volume infusions and/or elevated intravascular pressure (e.g., greater than normal systolic pressure, for example, less than or equal to a 5%, 10%, 15%, 20%, 25% increase in intravascular pressure over normal systolic pressure). Such methods may reduce or avoid the side effects associated with hydrodynamic techniques such as edema, nerve damage and/or compartment syndrome.

[0474] Furthermore, a composition comprising a ceDNA vector for expression of PAH protein as disclosed herein that is administered to a skeletal muscle can be administered to a skeletal muscle in the limbs (e.g., upper arm, lower arm, upper leg, and/or lower leg), back, neck, head (e.g., tongue), thorax, abdomen, pelvis/perineum, and/or digits. Suitable skeletal muscles include but are not limited to abductor digiti minimi (in the hand), abductor digiti minimi (in the foot), abductor hallucis, abductor ossis metatarsi quinti, abductor pollicis brevis, abductor pollicis longus, adductor brevis, adductor hallucis, adductor longus, adductor magnus, adductor pollicis, anconeus, anterior scalene, articularis genus, biceps brachii, biceps femoris, brachialis, brachioradialis, buccinator, coracobrachialis, corrugator supercilii, deltoid, depressor anguli oris, depressor labii inferioris, digastric, dorsal interossei (in the hand), dorsal interossei (in the foot), extensor carpi radialis brevis, extensor carpi radialis longus, extensor carpi ulnaris, extensor digiti minimi, extensor digitorum, extensor digitorum brevis, extensor digitorum longus, extensor hallucis brevis, extensor hallucis longus, extensor indicis, extensor pollicis brevis, extensor pollicis longus, flexor carpi radialis, flexor carpi ulnaris, flexor digiti minimi brevis (in the hand), flexor digiti minimi brevis (in the foot), flexor digitorum brevis, flexor digitorum longus, flexor digitorum profundus, flexor digitorum superficialis, flexor hallucis brevis, flexor hallucis longus, flexor pollicis brevis, flexor pollicis longus, frontalis, gastrocnemius, geniohyoid, gluteus maximus, gluteus medius, gluteus minimus, gracilis, iliocostalis cervicis, iliocostalis lumborum, iliocostalis thoracis, illiacus, inferior gemellus, inferior oblique, inferior rectus, infraspinatus, interspinalis, intertransversi, lateral pterygoid, lateral rectus, latissimus dorsi, levator anguli oris, levator labii superioris, levator labii superioris alaeque nasi, levator palpebrae superioris, levator scapulae, long rotators, longissimus capitis, longissimus cervicis, longissimus thoracis, longus capitis, longus colli, lumbricals (in the hand), lumbricals (in the foot), masseter, medial pterygoid, medial rectus, middle scalene, multifidus, mylohyoid, obliquus capitis inferior, obliquus capitis superior, obturator externus, obturator internus, occipitalis, omohyoid, opponens digiti minimi, opponens pollicis, orbicularis oculi, orbicularis oris, palmar interossei, palmaris brevis, palmaris longus, pectineus, pectoralis major, pectoralis minor, peroneus brevis, peroneus longus, peroneus tertius, piriformis, plantar interossei, plantaris, platysma, popliteus, posterior scalene, pronator quadratus, pronator teres, psoas major, quadratus femoris, quadratus plantae, rectus capitis anterior, rectus capitis lateralis, rectus capitis posterior major, rectus capitis posterior minor, rectus femoris, rhomboid major, rhomboid minor, risorius, sartorius, scalenus minimus, semimembranosus, semispinalis capitis, semispinalis cervicis, semispinalis thoracis, semitendinosus, serratus anterior, short rotators, soleus, spinalis capitis, spinalis cervicis, spinalis thoracis, splenius capitis, splenius cervicis, sternocleidomastoid, sternohyoid, sternothyroid, stylohyoid, subclavius, subscapularis, superior gemellus, superior oblique, superior rectus, supinator, supraspinatus, temporalis, tensor fascia lata, teres major, teres minor, thoracis, thyrohyoid, tibialis anterior, tibialis posterior, trapezius, triceps brachii, vastus intermedius, vastus lateralis, vastus medialis, zygomaticus major, and zygomaticus minor, and any other suitable skeletal muscle as known in the art.

[0475] Administration of a ceDNA vector for expression of PAH protein as disclosed herein to diaphragm muscle can be by any suitable method including intravenous administration, intra-arterial administration, and/or intra-peritoneal administration. In some embodiments, delivery of an expressed transgene from the ceDNA vector to a target tissue can also be achieved by delivering a synthetic depot comprising the ceDNA vector, where a depot comprising the ceDNA vector is implanted into skeletal, smooth, cardiac and/or diaphragm muscle tissue or the muscle tissue can be contacted with a film or other matrix comprising the ceDNA vector as described herein. Such implantable matrices or substrates are described in U.S. Pat. No. 7,201,898, incorporated by reference in its entirety herein.

[0476] Administration of a ceDNA vector for expression of PAH protein as disclosed herein to cardiac muscle includes administration to the left atrium, right atrium, left ventricle, right ventricle and/or septum. The ceDNA vector as described herein can be delivered to cardiac muscle by intravenous administration, intra-arterial administration such as intra-aortic administration, direct cardiac injection (e.g., into left atrium, right atrium, left ventricle, right ventricle), and/or coronary artery perfusion.

[0477] Administration of a ceDNA vector for expression of PAH protein as disclosed herein to smooth muscle can be by any suitable method including intravenous administration, intra-arterial administration, and/or intra-peritoneal administration. In one embodiment, administration can be to endothelial cells present in, near, and/or on smooth muscle. Non-limiting examples of smooth muscles include the iris of the eye, bronchioles of the lung, laryngeal muscles (vocal cords), muscular layers of the stomach, esophagus, small and large intestine of the gastrointestinal tract, ureter, detrusor muscle of the urinary bladder, uterine myometrium, penis, or prostate gland.

[0478] In some embodiments, of a ceDNA vector for expression of PAH protein as disclosed herein is administered to skeletal muscle, diaphragm muscle and/or cardiac muscle. In representative embodiments, a ceDNA vector according to the present disclosure is used to treat and/or prevent disorders of skeletal, cardiac and/or diaphragm muscle.

[0479] Specifically, it is contemplated that a composition comprising a ceDNA vector for expression of PAH protein as disclosed herein can be delivered to one or more muscles of the eye (e.g., Lateral rectus, Medial rectus, Superior rectus, Inferior rectus, Superior oblique, Inferior oblique), facial muscles (e.g., Occipitofrontalis muscle, Temporoparietalis muscle, Procerus muscle, Nasalis muscle, Depressor septi nasi muscle, Orbicularis oculi muscle, Corrugator supercilii muscle, Depressor supercilii muscle, Auricular muscles, Orbicularis oris muscle, Depressor anguli oris muscle, Risorius, Zygomaticus major muscle, Zygomaticus minor muscle, Levator labii superioris, Levator labii superioris alaeque nasi muscle, Depressor labii inferioris muscle, Levator anguli oris, Buccinator muscle, Mentalis) or tongue muscles (e.g., genioglossus, hyoglossus, chondroglossus, styloglossus, palatoglossus, superior longitudinal muscle, inferior longitudinal muscle, the vertical muscle, and the transverse muscle).

[0480] (i) Intramuscular Injection:

[0481] In some embodiments, a composition comprising a ceDNA vector for expression of PAH protein as disclosed herein can be injected into one or more sites of a given muscle, for example, skeletal muscle (e.g., deltoid, vastus lateralis, ventrogluteal muscle of dorsogluteal muscle, or anterolateral thigh for infants) in a subject using a needle. The composition comprising ceDNA can be introduced to other subtypes of muscle cells. Non-limiting examples of muscle cell subtypes include skeletal muscle cells, cardiac muscle cells, smooth muscle cells and/or diaphragm muscle cells.

[0482] Methods for intramuscular injection are known to those of skill in the art and as such are not described in detail herein.

[0483] In some embodiments, intramuscular injection can be combined with electroporation, delivery pressure or the use of transfection reagents to enhance cellular uptake of the ceDNA vector.

[0484] (ii) Transfection Reagents

[0485] In some embodiments, a ceDNA vector for expression of PAH protein as disclosed herein is formulated in compositions comprising one or more transfection reagents to facilitate uptake of the vectors into myotubes or muscle tissue. Thus, in one embodiment, the nucleic acids described herein are administered to a muscle cell, myotube or muscle tissue by transfection using methods described elsewhere herein.
[0486] (iii) Electroporation

[0487] In certain embodiments, a ceDNA vector for expression of PAH protein as disclosed herein is administered in the absence of a carrier to facilitate entry of ceDNA into the cells, or in a physiologically inert pharmaceutically acceptable carrier (i.e., any carrier that does not improve or enhance uptake of the capsid free, non-viral vectors into the myotubes). In such embodiments, the uptake of the capsid free, non-viral vector can be facilitated by electroporation of the cell or tissue.

[0488] Cell membranes naturally resist the passage of extracellular into the cell cytoplasm. One method for temporarily reducing this resistance is “electroporation”, where electrical fields are used to create pores in cells without causing permanent damage to the cells. These pores are large enough to allow DNA vectors, pharmaceutical drugs, DNA, and other polar compounds to gain access to the interior of the cell. With time, the pores in the cell membrane close and the cell once again becomes impermeable.

[0489] Electroporation can be used in both in vitro and in vivo applications to introduce e.g., exogenous DNA into living cells. In vitro applications typically mix a sample of live cells with the composition comprising e.g., DNA. The cells are then placed between electrodes such as parallel plates and an electrical field is applied to the cell/composition mixture.

[0490] There are a number of methods for in vivo electroporation; electrodes can be provided in various configurations such as, for example, a caliper that grips the epidermis overlying a region of cells to be treated. Alternatively, needle-shaped electrodes may be inserted into the tissue, to access more deeply located cells. In either case, after the composition comprising e.g., nucleic acids are injected into the treatment region, the electrodes apply an electrical field to the region. In some electroporation applications, this electric field comprises a single square wave pulse on the order of 100 to 500 V/cm. of about 10 to 60 ms duration. Such a pulse may be generated, for example, in known applications of the Electro Square Porator T820, made by the BTX Division of Genetronics, Inc.

[0491] Typically, successful uptake of e.g., nucleic acids occurs only if the muscle is electrically stimulated immediately, or shortly after administration of the composition, for example, by injection into the muscle.

[0492] In certain embodiments, electroporation is achieved using pulses of electric fields or using low voltage/long pulse treatment regimens (e.g., using a square wave pulse electroporation system). Exemplary pulse generators capable of generating a pulsed electric field include, for example, the ECM600, which can generate an exponential wave form, and the ElectroSquarePorator (T820), which can generate a square wave form, both of which are available from BTX, a division of Genetronics, Inc. (San Diego, Calif.). Square wave electroporation systems deliver controlled electric pulses that rise quickly to a set voltage, stay at that level for a set length of time (pulse length), and then quickly drop to zero.

[0493] In some embodiments, a local anesthetic is administered, for example, by injection at the site of treatment to reduce pain that may be associated with electroporation of the tissue in the presence of a composition comprising a capsid free, non-viral vector as described herein. In addition, one of skill in the art will appreciate that a dose of the composition should be chosen that minimizes and/or prevents excessive tissue damage resulting in fibrosis, necrosis or inflammation of the muscle.

[0494] (iv) Delivery Pressure

[0495] In some embodiments, delivery of a ceDNA vector for expression of PAH protein as disclosed herein to muscle tissue is facilitated by delivery pressure, which uses a combination of large volumes and rapid injection into an artery supplying a limb (e.g., iliac artery). This mode of administration can be achieved through a variety of methods that involve infusing limb vasculature with a composition comprising a ceDNA vector, typically while the muscle is isolated from the systemic circulation using a tourniquet of vessel clamps. In one method, the composition is circulated through the limb vasculature to permit extravasation into the cells. In another method, the intravascular hydrodynamic pressure is increased to expand vascular beds and increase uptake of the ceDNA vector into the muscle cells or tissue. In one embodiment, the ceDNA composition is administered into an artery.

[0496] (v) Lipid Nanoparticle Compositions

[0497] In some embodiments, a ceDNA vector for expression of PAH protein as disclosed herein for intramuscular delivery are formulated in a composition comprising a liposome as described elsewhere herein.

[0498] (vi) Systemic Administration of a ceDNA Vector Targeted to Muscle Tissue

[0499] In some embodiments, a ceDNA vector for expression of PAH protein as disclosed herein is formulated to be targeted to the muscle via indirect delivery administration, where the ceDNA is transported to the muscle as opposed to the liver. Accordingly, the technology described herein encompasses indirect administration of compositions comprising a ceDNA vector for expression of PAH protein as disclosed herein to muscle tissue, for example, by systemic administration. Such compositions can be administered topically, intravenously (by bolus or continuous infusion), intracellular injection, intratissue injection, orally, by inhalation, intraperitoneally, subcutaneously, intracavity, and can be delivered by peristaltic means, if desired, or by other means known by those skilled in the art. The agent can be administered systemically, for example, by intravenous infusion, if so desired.

[0500] In some embodiments, uptake of a ceDNA vector for expression of PAH protein as disclosed herein into muscle cells/tissue is increased by using a targeting agent or moiety that preferentially directs the vector to muscle tissue. Thus, in some embodiments, a capsid free, ceDNA vector can be concentrated in muscle tissue as compared to the amount of capsid free ceDNA vectors present in other cells or tissues of the body.

[0501] In some embodiments, the composition comprising a ceDNA vector for expression of PAH protein as disclosed herein further comprises a targeting moiety to muscle cells. In other embodiments, the expressed gene product comprises a targeting moiety specific to the tissue in which it is desired to act. The targeting moiety can include any molecule, or complex of molecules, which is/are capable of targeting, interacting with, coupling with, and/or binding to an intracellular, cell surface, or extracellular biomarker of a cell or tissue. The biomarker can include, for example, a cellular protease, a kinase, a protein, a cell surface receptor, a lipid, and/or fatty acid. Other examples of biomarkers that the targeting moieties can target, interact with, couple with, and/or bind to include molecules associated with a particular disease. For example, the biomarkers can include cell surface receptors implicated in cancer development, such as epidermal growth factor receptor and transferrin receptor. The targeting moieties can include, but are not limited to, synthetic compounds, natural compounds or products, macromolecular entities, bioengineered molecules (e.g., polypeptides, lipids, polynucleotides, antibodies, antibody fragments), and small entities (e.g., small molecules, neurotransmitters, substrates, ligands, hormones and elemental compounds) that bind to molecules expressed in the target muscle tissue.

[0502] In certain embodiments, the targeting moiety may further comprise a receptor molecule, including, for example, receptors, which naturally recognize a specific desired molecule of a target cell. Such receptor molecules include receptors that have been modified to increase their specificity of interaction with a target molecule, receptors that have been modified to interact with a desired target molecule not naturally recognized by the receptor, and fragments of such receptors (see, e.g., Skerra, 2000, J. Molecular Recognition, 13:167-187). A preferred receptor is a chemokine receptor. Exemplary chemokine receptors have been described in, for example, Lapidot et al, 2002, Exp Hematol, 30:973-81 and Onuffer et al, 2002, Trends Pharmacol Sci, 23:459-67.

[0503] In other embodiments, the additional targeting moiety may comprise a ligand molecule, including, for example, ligands which naturally recognize a specific desired receptor of a target cell, such as a Transferrin (Tf) ligand. Such ligand molecules include ligands that have been modified to increase their specificity of interaction with a target receptor, ligands that have been modified to interact with a desired receptor not naturally recognized by the ligand, and fragments of such ligands.

[0504] In still other embodiments, the targeting moiety may comprise an aptamer. Aptamers are oligonucleotides that are selected to bind specifically to a desired molecular structure of the target cell. Aptamers typically are the products of an affinity selection process similar to the affinity selection of phage display (also known as in vitro molecular evolution). The process involves performing several tandem iterations of affinity separation, e.g., using a solid support to which the diseased immunogen is bound, followed by polymerase chain reaction (PCR) to amplify nucleic acids that bound to the immunogens. Each round of affinity separation thus enriches the nucleic acid population for molecules that successfully bind the desired immunogen. In this manner, a random pool of nucleic acids may be “educated” to yield aptamers that specifically bind target molecules. Aptamers typically are RNA, but may be DNA or analogs or derivatives thereof, such as, without limitation, peptide nucleic acids (PNAs) and phosphorothioate nucleic acids.

[0505] In some embodiments, the targeting moiety can comprise a photo-degradable ligand (i.e., a ‘caged’ ligand) that is released, for example, from a focused beam of light such that the capsid free, non-viral vectors or the gene product are targeted to a specific tissue.

[0506] It is also contemplated herein that the compositions be delivered to multiple sites in one or more muscles of the subject. That is, injections can be in at least 2, at least 3, at least 4, at least 5, at least 6, at least 7, at least 8, at least 9, at least 10, at least 15, at least 20, at least 25, at least 30, at least 35, at least 40, at least 45, at least 50, at least 55, at least 60, at least 65, at least 70, at least 75, at least 80, at least 85, at least 90, at least 95, at least 100 injections sites. Such sites can be spread over the area of a single muscle or can be distributed among multiple muscles.

B. Administration of the ceDNA Vector for Expression of PAH Protein to Non-Muscle Locations

[0507] In another embodiment, a ceDNA vector for expression of PAH protein is administered to the liver. The ceDNA vector may also be administered to different regions of the eye such as the cornea and/or optic nerve The ceDNA vector may also be introduced into the spinal cord, brainstem (medulla oblongata, pons), midbrain (hypothalamus, thalamus, epithalamus, pituitary gland, substantia nigra, pineal gland), cerebellum, telencephalon (corpus striatum, cerebrum including the occipital, temporal, parietal and frontal lobes, cortex, basal ganglia, hippocampus and portaamygdala), limbic system, neocortex, corpus striatum, cerebrum, and inferior colliculus. The ceDNA vector may be delivered into the cerebrospinal fluid (e.g., by lumbar puncture). The ceDNA vector for expression of PAH protein may further be administered intravascularly to the CNS in situations in which the blood-brain barrier has been perturbed (e.g., brain tumor or cerebral infarct).

[0508] In some embodiments, the ceDNA vector for expression of PAH protein can be administered to the desired region(s) of the eye by any route known in the art, including but not limited to, intrathecal, intra-ocular, intracerebral, intraventricular, intravenous (e.g., in the presence of a sugar such as mannitol), intranasal, intra-aural, intra-ocular (e.g., intra-vitreous, sub-retinal, anterior chamber) and peri-ocular (e.g., sub-Tenon's region) delivery as well as intramuscular delivery with retrograde delivery to motor neurons.

[0509] In some embodiments, the ceDNA vector for expression of PAH protein is administered in a liquid formulation by direct injection (e.g., stereotactic injection) to the desired region or compartment in the CNS. In other embodiments, the ceDNA vector can be provided by topical application to the desired region or by intra-nasal administration of an aerosol formulation. Administration to the eye may be by topical application of liquid droplets. As a further alternative, the ceDNA vector can be administered as a solid, slow-release formulation (see, e.g., U.S. Pat. No. 7,201,898). In yet additional embodiments, the ceDNA vector can used for retrograde transport to treat, ameliorate, and/or prevent diseases and disorders involving motor neurons (e.g., amyotrophic lateral sclerosis (ALS); spinal muscular atrophy (SMA), etc.). For example, the ceDNA vector can be delivered to muscle tissue from which it can migrate into neurons.

### C. Ex Vivo Treatment

[0510] In some embodiments, cells are removed from a subject, a ceDNA vector for expression of PAH protein as disclosed herein is introduced therein, and the cells are then replaced back into the subject. Methods of removing cells from subject for treatment ex vivo, followed by introduction back into the subject are known in the art (see, e.g., U.S. Pat. No. 5,399,346; the disclosure of which is incorporated herein in its entirety). Alternatively, a ceDNA vector is introduced into cells from another subject, into cultured cells, or into cells from any other suitable source, and the cells are administered to a subject in need thereof.

[0511] Cells transduced with a ceDNA vector for expression of PAH protein as disclosed herein are preferably administered to the subject in a “therapeutically-effective amount” in combination with a pharmaceutical carrier. Those skilled in the art will appreciate that the therapeutic effects need not be complete or curative, as long as some benefit is provided to the subject.

[0512] In some embodiments, a ceDNA vector for expression of PAH protein as disclosed herein can encode an PAH protein as described herein (sometimes called a transgene or heterologous nucleotide sequence) that is to be produced in a cell in vitro, ex vivo, or in vivo. For example, in contrast to the use of the ceDNA vectors described herein in a method of treatment as discussed herein, in some embodiments a ceDNA vector for expression of PAH protein may be introduced into cultured cells and the expressed PAH protein isolated from the cells, e.g., for the production of antibodies and fusion proteins. In some embodiments, the cultured cells comprising a ceDNA vector for expression of PAH protein as disclosed herein can be used for commercial production of antibodies or fusion proteins, e.g., serving as a cell source for small or large scale biomanufacturing of antibodies or fusion proteins. In alternative embodiments, a ceDNA vector for expression of PAH protein as disclosed herein is introduced into cells in a host non-human subject, for in vivo production of antibodies or fusion proteins, including small scale production as well as for commercial large scale PAH protein production.

[0513] The ceDNA vectors for expression of PAH protein as disclosed herein can be used in both veterinary and medical applications. Suitable subjects for ex vivo gene delivery methods as described above include both avians (e.g., chickens, ducks, geese, quail, turkeys and pheasants) and mammals (e.g., humans, bovines, ovines, caprines, equines, felines, canines, and lagomorphs), with mammals being preferred. Human subjects are most preferred. Human subjects include neonates, infants, juveniles, and adults.

### D. Dose Ranges

[0514] Provided herein are methods of treatment comprising administering to the subject an effective amount of a composition comprising a ceDNA vector encoding an PAH protein as described herein. As will be appreciated by a skilled practitioner, the term “effective amount” refers to the amount of the ceDNA composition administered that results in expression of the PAH protein in a “therapeutically effective amount” for the treatment of PKU.

[0515] In vivo and/or in vitro assays can optionally be employed to help identify optimal dosage ranges for use. The precise dose to be employed in the formulation will also depend on the route of administration, and the seriousness of the condition, and should be decided according to the judgment of the person of ordinary skill in the art and each subject's circumstances. Effective doses can be extrapolated from dose-response curves derived from in vitro or animal model test systems, e.g.

[0516] A ceDNA vectors for expression of PAH protein as disclosed herein is administered in sufficient amounts to transfect the cells of a desired tissue and to provide sufficient levels of gene transfer and expression without undue adverse effects. Conventional and pharmaceutically acceptable routes of administration include, but are not limited to, those described above in the “Administration” section, such as direct delivery to the selected organ (e.g., intraportal delivery to the liver), oral, inhalation (including intranasal and intratracheal delivery), intraocular, intravenous, intramuscular, subcutaneous, intradermal, intratumoral, and other parental routes of administration. Routes of administration can be combined, if desired.

[0517] The dose of the amount of a ceDNA vectors for expression of PAH protein as disclosed herein required to achieve a particular “therapeutic effect,” will vary based on several factors including, but not limited to: the route of nucleic acid administration, the level of gene or RNA expression required to achieve a therapeutic effect, the specific disease or disorder being treated, and the stability of the gene(s), RNA product(s), or resulting expressed protein(s). One of skill in the art can readily determine a ceDNA vector dose range to treat a patient having a particular disease or disorder based on the aforementioned factors, as well as other factors that are well known in the art.

[0518] Dosage regime can be adjusted to provide the optimum therapeutic response. For example, the oligonucleotide can be repeatedly administered, e.g., several doses can be administered daily or the dose can be proportionally reduced as indicated by the exigencies of the therapeutic situation. One of ordinary skill in the art will readily be able to determine appropriate doses and schedules of administration of the subject oligonucleotides, whether the oligonucleotides are to be administered to cells or to subjects.

[0519] A “therapeutically effective dose” will fall in a relatively broad range that can be determined through clinical trials and will depend on the particular application (neural cells will require very small amounts, while systemic injection would require large amounts). For example, for direct in vivo injection into skeletal or cardiac muscle of a human subject, a therapeutically effective dose will be on the order of from about 1 μg to 100 g of the ceDNA vector. If exosomes or microparticles are used to deliver the ceDNA vector, then a therapeutically effective dose can be determined experimentally, but is expected to deliver from 1 μg to about 100 g of vector. Moreover, a therapeutically effective dose is an amount ceDNA vector that expresses a sufficient amount of the transgene to have an effect on the subject that results in a reduction in one or more symptoms of the disease, but does not result in significant off-target or significant adverse side effects. In one embodiment, a “therapeutically effective amount” is an amount of an expressed PAH protein that is sufficient to produce a statistically significant, measurable change in expression of PKU biomarker or reduction of a given disease symptom. Such effective amounts can be gauged in clinical trials as well as animal studies for a given ceDNA vector composition.

[0520] Formulation of pharmaceutically-acceptable excipients and carrier solutions is well-known to those of skill in the art, as is the development of suitable dosing and treatment regimens for using the particular compositions described herein in a variety of treatment regimens.

[0521] For in vitro transfection, an effective amount of a ceDNA vectors for expression of PAH protein as disclosed herein to be delivered to cells (1×10⁶ cells) will be on the order of 0.1 to 100 μg ceDNA vector, preferably 1 to 20 μg, and more preferably 1 to 15 μg or 8 to 10 μg. Larger ceDNA vectors will require higher doses. If exosomes or microparticles are used, an effective in vitro dose can be determined experimentally but would be intended to deliver generally the same amount of the ceDNA vector.

[0522] For the treatment of PKU, the appropriate dosage of a ceDNA vector that expresses an PAH protein as disclosed herein will depend on the specific type of disease to be treated, the type of a PAH protein, the severity and course of the PKU disease, previous therapy, the patient's clinical history and response to the antibody, and the discretion of the attending physician. The ceDNA vector encoding a PAH protein is suitably administered to the patient at one time or over a series of treatments. Various dosing schedules including, but not limited to, single or multiple administrations over various time-points, bolus administration, and pulse infusion are contemplated herein.

[0523] Depending on the type and severity of the disease, a ceDNA vector is administered in an amount that the encoded PAH protein is expressed at about 0.3 mg/kg to 100 mg/kg (e.g. 15 mg/kg-100 mg/kg, or any dosage within that range), by one or more separate administrations, or by continuous infusion. One typical daily dosage of the ceDNA vector is sufficient to result in the expression of the encoded PAH protein at a range from about 15 mg/kg to 100 mg/kg or more, depending on the factors mentioned above. One exemplary dose of the ceDNA vector is an amount sufficient to result in the expression of the encoded PAH protein as disclosed herein in a range from about 10 mg/kg to about 50 mg/kg. Thus, one or more doses of a ceDNA vector in an amount sufficient to result in the expression of the encoded PAH protein at about 0.5 mg/kg, 1 mg/kg, 1.5 mg/kg, 2.0 mg/kg, 3 mg/kg, 4.0 mg/kg, 5 mg/kg, 10 mg/kg, 15 mg/kg, 20 mg/kg, 25 mg/kg, 30 mg/kg, 35 mg/kg, 40 mg/kg, 50 mg/kg, 60 mg/kg, 70 mg/kg, 80 mg/kg, 90 mg/kg, or 100 mg/kg (or any combination thereof) may be administered to the patient. In some embodiments, the ceDNA vector is an amount sufficient to result in the expression of the encoded PAH protein for a total dose in the range of 50 mg to 2500 mg. An exemplary dose of a ceDNA vector is an amount sufficient to result in the total expression of the encoded PAH protein at about 50 mg, about 100 mg, 200 mg, 300 mg, 400 mg, about 500 mg, about 600 mg, about 700 mg, about 720 mg, about 1000 mg, about 1050 mg, about 1100 mg, about 1200 mg, about 1300 mg, about 1400 mg, about 1500 mg, about 1600 mg, about 1700 mg, about 1800 mg, about 1900 mg, about 2000 mg, about 2050 mg, about 2100 mg, about 2200 mg, about 2300 mg, about 2400 mg, or about 2500 mg (or any combination thereof). As the expression of the PAH protein from ceDNA vector can be carefully controlled by regulatory switches herein, or alternatively multiple dose of the ceDNA vector administered to the subject, the expression of the PAH protein from the ceDNA vector can be controlled in such a way that the doses of the expressed PAH protein may be administered intermittently, e.g. every week, every two weeks, every three weeks, every four weeks, every month, every two months, every three months, or every six months from the ceDNA vector. The progress of this therapy can be monitored by conventional techniques and assays.

[0524] In certain embodiments, a ceDNA vector is administered an amount sufficient to result in the expression of the encoded PAH protein at a dose of 15 mg/kg, 30 mg/kg, 40 mg/kg, 45 mg/kg, 50 mg/kg, 60 mg/kg or a flat dose, e.g., 300 mg, 500 mg, 700 mg, 800 mg, or higher. In some embodiments, the expression of the PAH protein from the ceDNA vector is controlled such that the PAH protein is expressed every day, every other day, every week, every 2 weeks or every 4 weeks for a period of time. In some embodiments, the expression of the PAH protein from the ceDNA vector is controlled such that the PAH protein is expressed every 2 weeks or every 4 weeks for a period of time. In certain embodiments, the period of time is 6 months, one year, eighteen months, two years, five years, ten years, 15 years, 20 years, or the lifetime of the patient.

[0525] Treatment can involve administration of a single dose or multiple doses. In some embodiments, more than one dose can be administered to a subject; in fact, multiple doses can be administered as needed, because the ceDNA vector elicits does not elicit an anti-capsid host immune response due to the absence of a viral capsid. As such, one of skill in the art can readily determine an appropriate number of doses. The number of doses administered can, for example, be on the order of 1-100, preferably 2-20 doses.

[0526] Without wishing to be bound by any particular theory, the lack of typical anti-viral immune response elicited by administration of a ceDNA vector as described by the disclosure (i.e., the absence of capsid components) allows the ceDNA vector for expression of PAH protein to be administered to a host on multiple occasions. In some embodiments, the number of occasions in which a nucleic acid, e.g., heterologous nucleic acid, is delivered to a subject is in a range of 2 to 10 times (e.g., 2, 3, 4, 5, 6, 7, 8, 9, or 10 times). In some embodiments, a ceDNA vector is delivered to a subject more than 10 times.

[0527] In some embodiments, a dose of a ceDNA vector for expression of PAH protein as disclosed herein is administered to a subject no more than once per calendar day (e.g., a 24-hour period). In some embodiments, a dose of a ceDNA vector is administered to a subject no more than once per 2, 3, 4, 5, 6, or 7 calendar days. In some embodiments, a dose of a ceDNA vector for expression of PAH protein as disclosed herein is administered to a subject no more than once per calendar week (e.g., 7 calendar days). In some embodiments, a dose of a ceDNA vector is administered to a subject no more than bi-weekly (e.g., once in a two calendar week period). In some embodiments, a dose of a ceDNA vector is administered to a subject no more than once per calendar month (e.g., once in 30 calendar days). In some embodiments, a dose of a ceDNA vector is administered to a subject no more than once per six calendar months. In some embodiments, a dose of a ceDNA vector is administered to a subject no more than once per calendar year (e.g., 365 days or 366 days in a leap year).

[0528] In particular embodiments, more than one administration (e.g., two, three, four or more administrations) of a ceDNA vector for expression of PAH protein as disclosed herein may be employed to achieve the desired level of gene expression over a period of various intervals, e.g., daily, weekly, monthly, yearly, etc.

[0529] In some embodiments, a therapeutic a PAH protein encoded by a ceDNA vector as disclosed herein can be regulated by a regulatory switch, inducible or repressible promotor so that it is expressed in a subject for at least 1 hour, at least 2 hours, at least 5 hours, at least 10 hours, at least 12 hours, at least 18 hours, at least 24 hours, at least 36 hours, at least 48 hours, at least 72 hours, at least 1 week, at least 2 weeks, at least 1 month, at least 2 months, at least 6 months, at least 12 months/one year, at least 2 years, at least 5 years, at least 10 years, at least 15 years, at least 20 years, at least 30 years, at least 40 years, at least 50 years or more. In one embodiment, the expression can be achieved by repeated administration of the ceDNA vectors described herein at predetermined or desired intervals. Alternatively, a ceDNA vector for expression of PAH protein as disclosed herein can further comprise components of a gene editing system (e.g., CRISPR/Cas, TALENs, zinc finger endonucleases etc.) to permit insertion of the one or more nucleic acid sequences encoding the PAH protein for substantially permanent treatment or “curing” the disease. Such ceDNA vectors comprising gene editing components are disclosed in International Application PCT/US18/64242, and can include the 5′ and 3′ homology arms (e.g., SEQ ID NO: 151-154, or sequences with at least 40%, 50%, 60%, 70% or 80% homology thereto) for insertion of the nucleic acid encoding the a PAH protein into safe harbor regions, such as, but not including albumin gene or CCR5 gene. By way of example, a ceDNA vector expressing a PAH protein can comprise at least one genomic safe harbor (GSH)-specific homology arms for insertion of the PAH transgene into a genomic safe harbor is disclosed in International Patent Application PCT/US2019/020225, filed on Mar. 1, 2019, which is incorporated herein in its entirety by reference.

[0530] The duration of treatment depends upon the subject's clinical progress and responsiveness to therapy. Continuous, relatively low maintenance doses are contemplated after an initial higher therapeutic dose.

### E. Unit Dosage Forms

[0531] In some embodiments, the pharmaceutical compositions comprising a ceDNA vector for expression of PAH protein as disclosed herein can conveniently be presented in unit dosage form. A unit dosage form will typically be adapted to one or more specific routes of administration of the pharmaceutical composition. In some embodiments, the unit dosage form is adapted for droplets to be administered directly to the eye. In some embodiments, the unit dosage form is adapted for administration by inhalation. In some embodiments, the unit dosage form is adapted for administration by a vaporizer. In some embodiments, the unit dosage form is adapted for administration by a nebulizer. In some embodiments, the unit dosage form is adapted for administration by an aerosolizer. In some embodiments, the unit dosage form is adapted for oral administration, for buccal administration, or for sublingual administration. In some embodiments, the unit dosage form is adapted for intravenous, intramuscular, or subcutaneous administration. In some embodiments, the unit dosage form is adapted for subretinal injection, suprachoroidal injection or intravitreal injection.

[0532] In some embodiments, the unit dosage form is adapted for intrathecal or intracerebroventricular administration. In some embodiments, the pharmaceutical composition is formulated for topical administration. The amount of active ingredient which can be combined with a carrier material to produce a single dosage form will generally be that amount of the compound which produces a therapeutic effect.

### X. Methods of Treatment

[0533] The technology described herein also demonstrates methods for making, as well as methods of using the disclosed ceDNA vectors for expression of PAH protein in a variety of ways, including, for example, ex vivo, ex situ, in vitro and in vivo applications, methodologies, diagnostic procedures, and/or gene therapy regimens.

[0534] In one embodiment, the expressed therapeutic PAH protein expressed from a ceDNA vector as disclosed herein is functional for the treatment of disease. In a preferred embodiment, the therapeutic PAH protein does not cause an immune system reaction, unless so desired.

[0535] Provided herein is a method of treating PKU in a subject comprising introducing into a target cell in need thereof (for example, a muscle cell or tissue, or other affected cell type) of the subject a therapeutically effective amount of a ceDNA vector for expression of PAH protein as disclosed herein, optionally with a pharmaceutically acceptable carrier. While the ceDNA vector can be introduced in the presence of a carrier, such a carrier is not required. The ceDNA vector implemented comprises a nucleic acid sequence encoding an PAH protein as described herein useful for treating the disease. In particular, a ceDNA vector for expression of PAH protein as disclosed herein may comprise a desired PAH protein DNA sequence operably linked to control elements capable of directing transcription of the desired PAH protein encoded by the exogenous DNA sequence when introduced into the subject. The ceDNA vector for expression of PAH protein as disclosed herein can be administered via any suitable route as provided above, and elsewhere herein.

[0536] Disclosed herein are ceDNA vector compositions and formulations for expression of PAH protein as disclosed herein that include one or more of the ceDNA vectors of the present disclosure together with one or more pharmaceutically-acceptable buffers, diluents, or excipients. Such compositions may be included in one or more diagnostic or therapeutic kits, for diagnosing, preventing, treating or ameliorating one or more symptoms of PKU. In one aspect the disease, injury, disorder, trauma or dysfunction is a human disease, injury, disorder, trauma or dysfunction.

[0537] Another aspect of the technology described herein provides a method for providing a subject in need thereof with a diagnostically- or therapeutically-effective amount of a ceDNA vector for expression of PAH protein as disclosed herein, the method comprising providing to a cell, tissue or organ of a subject in need thereof, an amount of the ceDNA vector as disclosed herein; and for a time effective to enable expression of the PAH protein from the ceDNA vector thereby providing the subject with a diagnostically- or a therapeutically-effective amount of the PAH protein expressed by the ceDNA vector. In a further aspect, the subject is human.

[0538] Another aspect of the technology described herein provides a method for diagnosing, preventing, treating, or ameliorating at least one or more symptoms of PKU, a disorder, a dysfunction, an injury, an abnormal condition, or trauma in a subject. In an overall and general sense, the method includes at least the step of administering to a subject in need thereof one or more of the disclosed ceDNA vector for PAH protein production, in an amount and for a time sufficient to diagnose, prevent, treat or ameliorate the one or more symptoms of the disease, disorder, dysfunction, injury, abnormal condition, or trauma in the subject. In such an embodiment, the subject can be evaluated for efficacy of the PAH protein, or alternatively, detection of the PAH protein or tissue location (including cellular and subcellular location) of the PAH protein in the subject. As such, the ceDNA vector for expression of PAH protein as disclosed herein can be used as an in vivo diagnostic tool, e.g., for the detection of cancer or other indications. In a further aspect, the subject is human.

[0539] Another aspect is use of a ceDNA vector for expression of PAH protein as disclosed herein as a tool for treating or reducing one or more symptoms of PKU or disease states. There are a number of inherited diseases in which defective genes are known, and typically fall into two classes: deficiency states, usually of enzymes, which are generally inherited in a recessive manner, and unbalanced states, which may involve regulatory or structural proteins, and which are typically but not always inherited in a dominant manner. For unbalanced disease states, a ceDNA vector for expression of PAH protein as disclosed herein can be used to create PKU state in a model system, which could then be used in efforts to counteract the disease state. Thus the ceDNA vector for expression of PAH protein as disclosed herein permit the treatment of genetic diseases. As used herein, PKU state is treated by partially or wholly remedying the deficiency or imbalance that causes the disease or makes it more severe.

### A. Host Cells

[0540] In some embodiments, a ceDNA vector for expression of PAH protein as disclosed herein delivers the PAH protein transgene into a subject host cell. In some embodiments, the cells are photoreceptor cells. In some embodiments, the cells are RPE cells. In some embodiments, the subject host cell is a human host cell, including, for example blood cells, stem cells, hematopoietic cells, CD34⁺ cells, liver cells, cancer cells, vascular cells, muscle cells, pancreatic cells, neural cells, ocular or retinal cells, epithelial or endothelial cells, dendritic cells, fibroblasts, or any other cell of mammalian origin, including, without limitation, hepatic (i.e., liver) cells, lung cells, cardiac cells, pancreatic cells, intestinal cells, diaphragmatic cells, renal (i.e., kidney) cells, neural cells, blood cells, bone marrow cells, or any one or more selected tissues of a subject for which gene therapy is contemplated. In one aspect, the subject host cell is a human host cell.

[0541] The present disclosure also relates to recombinant host cells as mentioned above, including a ceDNA vector for expression of PAH protein as disclosed herein. Thus, one can use multiple host cells depending on the purpose as is obvious to the skilled artisan. A construct or a ceDNA vector for expression of PAH protein as disclosed herein including donor sequence is introduced into a host cell so that the donor sequence is maintained as a chromosomal integrant as described earlier. The term host cell encompasses any progeny of a parent cell that is not identical to the parent cell due to mutations that occur during replication. The choice of a host cell will to a large extent depend upon the donor sequence and its source.

[0542] The host cell may also be a eukaryote, such as a mammalian, insect, plant, or fungal cell. In one embodiment, the host cell is a human cell (e.g., a primary cell, a stem cell, or an immortalized cell line). In some embodiments, the host cell can be administered a ceDNA vector for expression of PAH protein as disclosed herein ex vivo and then delivered to the subject after the gene therapy event. A host cell can be any cell type, e.g., a somatic cell or a stem cell, an induced pluripotent stem cell, or a blood cell, e.g., T-cell or B-cell, or bone marrow cell. In certain embodiments, the host cell is an allogenic cell. For example, T-cell genome engineering is useful for cancer immunotherapies, disease modulation such as HIV therapy (e.g., receptor knock out, such as CXCR4 and CCR5) and immunodeficiency therapies. MHC receptors on B-cells can be targeted for immunotherapy. In some embodiments, gene modified host cells, e.g., bone marrow stem cells, e.g., CD34⁺ cells, or induced pluripotent stem cells can be transplanted back into a patient for expression of a therapeutic protein.

### B. Additional Diseases for Gene Therapy

[0543] In general, a ceDNA vector for expression of PAH protein as disclosed herein can be used to deliver any PAH protein in accordance with the description above to treat, prevent, or ameliorate the symptoms associated with PKU related to an aberrant protein expression or gene expression in a subject.

[0544] In some embodiments, a ceDNA vector for expression of PAH protein as disclosed herein can be used to deliver an PAH protein to skeletal, cardiac or diaphragm muscle, for production of an PAH protein for secretion and circulation in the blood or for systemic delivery to other tissues to treat, ameliorate, and/or prevent PKU.

[0545] The a ceDNA vector for expression of PAH protein as disclosed herein can be administered to the lungs of a subject by any suitable means, optionally by administering an aerosol suspension of respirable particles comprising the ceDNA vectors, which the subject inhales. The respirable particles can be liquid or solid. Aerosols of liquid particles comprising the ceDNA vectors may be produced by any suitable means, such as with a pressure-driven aerosol nebulizer or an ultrasonic nebulizer, as is known to those of skill in the art. See, e.g., U.S. Pat. No. 4,501,729. Aerosols of solid particles comprising the ceDNA vectors may likewise be produced with any solid particulate medicament aerosol generator, by techniques known in the pharmaceutical art.

[0546] In some embodiments, a ceDNA vector for expression of PAH protein as disclosed herein can be administered to tissues of the CNS (e.g., brain, eye).

[0547] Ocular disorders that may be treated, ameliorated, or prevented with a ceDNA vector for expression of PAH protein as disclosed herein include ophthalmic disorders involving the retina, posterior tract, and optic nerve (e.g., retinitis pigmentosa, diabetic retinopathy and other retinal degenerative diseases, uveitis, age-related macular degeneration, glaucoma). Many ophthalmic diseases and disorders are associated with one or more of three types of indications: (1) angiogenesis, (2) inflammation, and (3) degeneration. In some embodiments, the ceDNA vector as disclosed herein can be employed to deliver anti-angiogenic factors; anti-inflammatory factors; factors that retard cell degeneration, promote cell sparing, or promote cell growth and combinations of the foregoing. Diabetic retinopathy, for example, is characterized by angiogenesis. Diabetic retinopathy can be treated by delivering one or more anti-angiogenic antibodies or fusion proteins either intraocularly (e.g., in the vitreous) or periocularly (e.g., in the sub-Tenon's region). Additional ocular diseases that may be treated, ameliorated, or prevented with the ceDNA vectors of the disclosure include geographic atrophy, vascular or “wet” macular degeneration, PKU, Leber Congenital Amaurosis (LCA), Usher syndrome, pseudoxanthoma elasticum (PXE), x-linked retinitis pigmentosa (XLRP), x-linked retinoschisis (XLRS), Choroideremia, Leber hereditary optic neuropathy (LHON), Archomatopsia, cone-rod dystrophy, Fuchs endothelial corneal dystrophy, diabetic macular edema and ocular cancer and tumors.

[0548] In some embodiments, inflammatory ocular diseases or disorders (e.g., uveitis) can be treated, ameliorated, or prevented by a ceDNA vector for expression of PAH protein as disclosed herein. One or more anti-inflammatory antibodies or fusion proteins can be expressed by intraocular (e.g., vitreous or anterior chamber) administration of the ceDNA vector as disclosed herein.

[0549] In some embodiments, a ceDNA vector for expression of PAH protein as disclosed herein can encode an PAH protein that is associated with transgene encoding a reporter polypeptide (e.g., an enzyme such as Green Fluorescent Protein, or alkaline phosphatase). In some embodiments, a transgene that encodes a reporter protein useful for experimental or diagnostic purposes, is selected from any of: β-lactamase, β-galactosidase (LacZ), alkaline phosphatase, thymidine kinase, green fluorescent protein (GFP), chloramphenicol acetyltransferase (CAT), luciferase, and others well known in the art. In some aspects, ceDNA vectors expressing an PAH protein linked to a reporter polypeptide may be used for diagnostic purposes, as well as to determine efficacy or as markers of the ceDNA vector's activity in the subject to which they are administered.

C. Testing for Successful Gene Expression Using a ceDNA Vector

[0550] Assays well known in the art can be used to test the efficiency of gene delivery of an PAH protein by a ceDNA vector can be performed in both in vitro and in vivo models. Levels of the expression of the PAH protein by ceDNA can be assessed by one skilled in the art by measuring mRNA and protein levels of the PAH protein (e.g., reverse transcription PCR, western blot analysis, and enzyme-linked immunosorbent assay (ELISA)). In one embodiment, ceDNA comprises a reporter protein that can be used to assess the expression of the PAH protein, for example by examining the expression of the reporter protein by fluorescence microscopy or a luminescence plate reader. For in vivo applications, protein function assays can be used to test the functionality of a given PAH protein to determine if gene expression has successfully occurred. One skilled will be able to determine the best test for measuring functionality of an PAH protein expressed by the ceDNA vector in vitro or in vivo.

[0551] It is contemplated herein that the effects of gene expression of an PAH protein from the ceDNA vector in a cell or subject can last for at least 1 month, at least 2 months, at least 3 months, at least four months, at least 5 months, at least six months, at least 10 months, at least 12 months, at least 18 months, at least 2 years, at least 5 years, at least 10 years, at least 20 years, or can be permanent.

[0552] In some embodiments, an PAH protein in the expression cassette, expression construct, or ceDNA vector described herein can be codon optimized for the host cell. As used herein, the term “codon optimized” or “codon optimization” refers to the process of modifying a nucleic acid sequence for enhanced expression in the cells of the vertebrate of interest, e.g., mouse or human (e.g., humanized), by replacing at least one, more than one, or a significant number of codons of the native sequence (e.g., a prokaryotic sequence) with codons that are more frequently or most frequently used in the genes of that vertebrate. Various species exhibit particular bias for certain codons of a particular amino acid. Typically, codon optimization does not alter the amino acid sequence of the original translated protein. Optimized codons can be determined using e.g., Aptagen's Gene Forge® codon optimization and custom gene synthesis platform (Aptagen, Inc.) or another publicly available database.

D. Determining Efficacy by Assessing PAH Protein Expression from the ceDNA Vector

[0553] Essentially any method known in the art for determining protein expression can be used to analyze expression of a PAH protein from a ceDNA vector. Non-limiting examples of such methods/assays include enzyme-linked immunoassay (ELISA), affinity ELISA, ELISPOT, serial dilution, flow cytometry, surface plasmon resonance analysis, kinetic exclusion assay, mass spectrometry, Western blot, immunoprecipitation, and PCR.

[0554] For assessing PAH protein expression in vivo, a biological sample can be obtained from a subject for analysis. Exemplary biological samples include a biofluid sample, a body fluid sample, blood (including whole blood), serum, plasma, urine, saliva, a biopsy and/or tissue sample etc. A biological sample or tissue sample can also refer to a sample of tissue or fluid isolated from an individual including, but not limited to, tumor biopsy, stool, spinal fluid, pleural fluid, nipple aspirates, lymph fluid, the external sections of the skin, respiratory, intestinal, and genitourinary tracts, tears, saliva, breast milk, cells (including, but not limited to, blood cells), tumors, organs, and also samples of in vitro cell culture constituent. The term also includes a mixture of the above-mentioned samples. The term “sample” also includes untreated or pretreated (or pre-processed) biological samples. In some embodiments, the sample used for the assays and methods described herein comprises a serum sample collected from a subject to be tested.

E. Determining Efficacy of the expressed PAH protein by Clinical Parameters

[0555] The efficacy of a given PAH protein expressed by a ceDNA vector for PKU (i.e., functional expression) can be determined by the skilled clinician. However, a treatment is considered “effective treatment,” as the term is used herein, if any one or all of the signs or symptoms of PKU is/are altered in a beneficial manner, or other clinically accepted symptoms or markers of disease are improved, or ameliorated, e.g., by at least 10% following treatment with a ceDNA vector encoding a therapeutic PAH protein as described herein. Efficacy can also be measured by failure of an individual to worsen as assessed by stabilization of PKU, or the need for medical interventions (i.e., progression of the disease is halted or at least slowed). Methods of measuring these indicators are known to those of skill in the art and/or described herein. Treatment includes any treatment of a disease in an individual or an animal (some non-limiting examples include a human, or a mammal) and includes: (1) inhibiting PKU, e.g., arresting, or slowing progression of PKU; or (2) relieving the PKU, e.g., causing regression of PKU symptoms; and (3) preventing or reducing the likelihood of the development of the PKU disease, or preventing secondary diseases/disorders associated with PKU. An effective amount for the treatment of a disease means that amount which, when administered to a mammal in need thereof, is sufficient to result in effective treatment as that term is defined herein, for that disease. Efficacy of an agent can be determined by assessing physical indicators that are particular to PKU disease. A physician can assess for any one or more of clinical symptoms of PKU which include: **(i) reduced serum phenylaline (Phe) levels on a regular diet. Reduction in Phe is a key biomarker in the development of treatments for PKU; (ii) restored Phe to tyrosine metabolic ratio on a normal diet. This pathway is responsible for the production of neurotransmitters; and/or (iii) assessment of reduced serum Phe levels.

### EXAMPLES

[0556] The following examples are provided by way of illustration not limitation. It will be appreciated by one of ordinary skill in the art that ceDNA vectors can be constructed from any of the wild-type or modified ITRs described herein, and that the following exemplary methods can be used to construct and assess the activity of such ceDNA vectors. While the methods are exemplified with certain ceDNA vectors, they are applicable to any ceDNA vector in keeping with the description.

### Example 1: Constructing ceDNA Vectors Using an Insect Cell-Based Method

[0557] Production of ceDNA vectors using a polynucleotide construct template is described in Example 1 of PCT/US18/49996, which is incorporated herein in its entirety by reference. For example, a polynucleotide construct template used for generating the ceDNA vectors of the present disclosure can be a ceDNA-plasmid, a ceDNA-Bacmid, and/or a ceDNA-baculovirus. Without being limited to theory, in a permissive host cell, in the presence of e.g., Rep, the polynucleotide construct template having two symmetric ITRs and an expression construct, where at least one of the ITRs is modified relative to a wild-type ITR sequence, replicates to produce ceDNA vectors. ceDNA vector production undergoes two steps: first, excision (“rescue”) of template from the template backbone (e.g., ceDNA-plasmid, ceDNA-bacmid, ceDNA-baculovirus genome etc.) via Rep proteins, and second, Rep mediated replication of the excised ceDNA vector.

[0558] Production of ceDNA-Bacmids:

[0559] DH10Bac competent cells (MAX EFFICIENCY® DH10Bac™ Competent Cells, Thermo Fisher) were transformed with either test or control plasmids following a protocol according to the manufacturer's instructions. Recombination between the plasmid and a baculovirus shuttle vector in the DH10Bac cells were induced to generate recombinant ceDNA-bacmids. The recombinant bacmids were selected by screening a positive selection based on blue-white screening in E. coli (Φ80dlacZΔM15 marker provides α-complementation of the β-galactosidase gene from the bacmid vector) on a bacterial agar plate containing X-gal and IPTG with antibiotics to select for transformants and maintenance of the bacmid and transposase plasmids. White colonies caused by transposition that disrupts the β-galactoside indicator gene were picked and cultured in 10 ml of media.

[0560] The recombinant ceDNA-bacmids were isolated from the E. coli and transfected into Sf9 or Sf21 insect cells using FugeneHD to produce infectious baculovirus. The adherent Sf9 or Sf21 insect cells were cultured in 50 ml of media in T25 flasks at 25° C. Four days later, culture medium (containing the P0 virus) was removed from the cells, filtered through a 0.45 μm filter, separating the infectious baculovirus particles from cells or cell debris.

[0561] Optionally, the first generation of the baculovirus (P0) was amplified by infecting naïve Sf9 or Sf21 insect cells in 50 to 500 ml of media. Cells were maintained in suspension cultures in an orbital shaker incubator at 130 rpm at 25° C., monitoring cell diameter and viability, until cells reach a diameter of 18-19 nm (from a naïve diameter of 14-15 nm), and a density of ˜4.0E+6 cells/mL. Between 3 and 8 days post-infection, the P1 baculovirus particles in the medium were collected following centrifugation to remove cells and debris then filtration through a 0.45 μm filter.

[0562] The ceDNA-baculovirus comprising the test constructs were collected and the infectious activity, or titer, of the baculovirus was determined. Specifically, four×20 ml Sf9 cell cultures at 2.5E+6 cells/ml were treated with P1 baculovirus at the following dilutions: 1/1000, 1/10,000, 1/50,000, 1/100,000, and incubated at 25-27° C. Infectivity was determined by the rate of cell diameter increase and cell cycle arrest, and change in cell viability every day for 4 to 5 days.

[0563] A “Rep-plasmid” as disclosed in FIG. 8A of PCT/US18/49996, which is incorporated herein in its entirety by reference, was produced in a pFASTBAC™-Dual expression vector (ThermoFisher) comprising both the Rep78 (SEQ ID NO: 131 or 133) and Rep52 (SEQ ID NO: 132) or Rep68 (SEQ ID NO: 130) and Rep40 (SEQ ID NO: 129). The Rep-plasmid was transformed into the DH10Bac competent cells (MAX EFFICIENCY@ DH10Bac™ Competent Cells (Thermo Fisher) following a protocol provided by the manufacturer. Recombination between the Rep-plasmid and a baculovirus shuttle vector in the DH10Bac cells were induced to generate recombinant bacmids (“Rep-bacmids”). The recombinant bacmids were selected by a positive selection that included-blue-white screening in E. coli ((D80dlacZΔM15 marker provides α-complementation of the 0-galactosidase gene from the bacmid vector) on a bacterial agar plate containing X-gal and IPTG. Isolated white colonies were picked and inoculated in 10 ml of selection media (kanamycin, gentamicin, tetracycline in LB broth). The recombinant bacmids (Rep-bacmids) were isolated from the E. coli and the Rep-bacmids were transfected into Sf9 or Sf21 insect cells to produce infectious baculovirus.

[0564] The Sf9 or Sf21 insect cells were cultured in 50 ml of media for 4 days, and infectious recombinant baculovirus (“Rep-baculovirus”) were isolated from the culture. Optionally, the first generation Rep-baculovirus (P0) were amplified by infecting naïve Sf9 or Sf21 insect cells and cultured in 50 to 500 ml of media. Between 3 and 8 days post-infection, the P1 baculovirus particles in the medium were collected either by separating cells by centrifugation or filtration or another fractionation process. The Rep-baculovirus were collected and the infectious activity of the baculovirus was determined. Specifically, four×20 mL Sf9 cell cultures at 2.5×10⁶ cells/mL were treated with P1 baculovirus at the following dilutions, 1/1000, 1/10,000, 1/50,000, 1/100,000, and incubated. Infectivity was determined by the rate of cell diameter increase and cell cycle arrest, and change in cell viability every day for 4 to 5 days.

[0565] ceDNA Vector Generation and Characterization

[0566] With reference to FIG. 3B, Sf9 insect cell culture media containing either (1) a sample-containing a ceDNA-bacmid or a ceDNA-baculovirus, and (2) Rep-baculovirus described above were then added to a fresh culture of Sf9 cells (2.5E+6 cells/ml, 20 ml) at a ratio of 1:1000 and 1:10,000, respectively. The cells were then cultured at 130 rpm at 25° C. 4-5 days after the co-infection, cell diameter and viability are detected. When cell diameters reached 18-20 nm with a viability of ˜70-80%, the cell cultures were centrifuged, the medium was removed, and the cell pellets were collected. The cell pellets are first resuspended in an adequate volume of aqueous medium, either water or buffer. The ceDNA vector was isolated and purified from the cells using Qiagen MIDI PLUS™ purification protocol (Qiagen, 0.2 mg of cell pellet mass processed per column).

[0567] Yields of ceDNA vectors produced and purified from the Sf9 insect cells were initially determined based on UV absorbance at 260 nm.

[0568] ceDNA vectors can be assessed by identified by agarose gel electrophoresis under native or denaturing conditions as illustrated in FIG. 3D, where (a) the presence of characteristic bands migrating at twice the size on denaturing gels versus native gels after restriction endonuclease cleavage and gel electrophoretic analysis and (b) the presence of monomer and dimer (2×) bands on denaturing gels for uncleaved material is characteristic of the presence of ceDNA vector.

[0569] Structures of the isolated ceDNA vectors were further analyzed by digesting the DNA obtained from co-infected Sf9 cells (as described herein) with restriction endonucleases selected for a) the presence of only a single cut site within the ceDNA vectors, and b) resulting fragments that were large enough to be seen clearly when fractionated on a 0.8% denaturing agarose gel (>800 bp). As illustrated in FIGS. 3D and 3E, linear DNA vectors with a non-continuous structure and ceDNA vector with the linear and continuous structure can be distinguished by sizes of their reaction products—for example, a DNA vector with a non-continuous structure is expected to produce 1 kb and 2 kb fragments, while a non-encapsidated vector with the continuous structure is expected to produce 2 kb and 4 kb fragments.

[0570] Therefore, to demonstrate in a qualitative fashion that isolated ceDNA vectors are covalently closed-ended as is required by definition, the samples were digested with a restriction endonuclease identified in the context of the specific DNA vector sequence as having a single restriction site, preferably resulting in two cleavage products of unequal size (e.g., 1000 bp and 2000 bp). Following digestion and electrophoresis on a denaturing gel (which separates the two complementary DNA strands), a linear, non-covalently closed DNA will resolve at sizes 1000 bp and 2000 bp, while a covalently closed DNA (i.e., a ceDNA vector) will resolve at 2× sizes (2000 bp and 4000 bp), as the two DNA strands are linked and are now unfolded and twice the length (though single stranded). Furthermore, digestion of monomeric, dimeric, and n-meric forms of the DNA vectors will all resolve as the same size fragments due to the end-to-end linking of the multimeric DNA vectors (see FIG. 3D). FIG. 4 is an exemplary picture of a denaturing gel running examples of ceDNA vectors with (+) or without (−) digestion with endonucleases (EcoRI for ceDNA construct 1 and 2; BamHI for ceDNA construct 3 and 4; SpeI for ceDNA construct 5 and 6; and XhoI for ceDNA construct 7 and 8) Constructs 1-8 are described in Example 1 of International Application PCT PCT/US18/49996, which is incorporated herein in its entirety by reference. Sizes of bands highlighted with an asterisk were determined and provided on the bottom of the picture.

[0571] As used herein, the phrase “assay for the Identification of DNA vectors by agarose gel electrophoresis under native gel and denaturing conditions” refers to an assay to assess the close-endedness of the ceDNA by performing restriction endonuclease digestion followed by electrophoretic assessment of the digest products. One such exemplary assay follows, though one of ordinary skill in the art will appreciate that many art-known variations on this example are possible. The restriction endonuclease is selected to be a single cut enzyme for the ceDNA vector of interest that will generate products of approximately ⅓× and ⅔× of the DNA vector length. This resolves the bands on both native and denaturing gels. Before denaturation, it is important to remove the buffer from the sample. The Qiagen PCR clean-up kit or desalting “spin columns,” e.g., GE HEALTHCARE ILUSTRA™ MICROSPIN™ G-25 columns are some art-known options for the endonuclease digestion. The assay includes for example, i) digest DNA with appropriate restriction endonuclease(s), 2) apply to e.g., a Qiagen PCR clean-up kit, elute with distilled water, iii) adding 10× denaturing solution (10×=0.5 M NaOH, 10 mM EDTA), add 10× dye, not buffered, and analyzing, together with DNA ladders prepared by adding 10× denaturing solution to 4×, on a 0.8-1.0% gel previously incubated with 1 mM EDTA and 200 mM NaOH to ensure that the NaOH concentration is uniform in the gel and gel box, and running the gel in the presence of 1× denaturing solution (50 mM NaOH, 1 mM EDTA). One of ordinary skill in the art will appreciate what voltage to use to run the electrophoresis based on size and desired timing of results. After electrophoresis, the gels are drained and neutralized in 1×TBE or TAE and transferred to distilled water or 1×TBE/TAE with 1×SYBR Gold. Bands can then be visualized with e.g. Thermo Fisher, SYBR® Gold Nucleic Acid Gel Stain (10,000× Concentrate in DMSO) and epifluorescent light (blue) or UV (312 nm).

[0572] The purity of the generated ceDNA vector can be assessed using any art-known method. As one exemplary and non-limiting method, contribution of ceDNA-plasmid to the overall UV absorbance of a sample can be estimated by comparing the fluorescent intensity of ceDNA vector to a standard. For example, if based on UV absorbance 4 μg of ceDNA vector was loaded on the gel, and the ceDNA vector fluorescent intensity is equivalent to a 2 kb band which is known to be 1 μg, then there is 1 μg of ceDNA vector, and the ceDNA vector is 25% of the total UV absorbing material. Band intensity on the gel is then plotted against the calculated input that band represents—for example, if the total ceDNA vector is 8 kb, and the excised comparative band is 2 kb, then the band intensity would be plotted as 25% of the total input, which in this case would be 0.25 μg for 1.0 μg input. Using the ceDNA vector plasmid titration to plot a standard curve, a regression line equation is then used to calculate the quantity of the ceDNA vector band, which can then be used to determine the percent of total input represented by the ceDNA vector, or percent purity.

[0573] For comparative purposes, Example 1 describes the production of ceDNA vectors using an insect cell-based method and a polynucleotide construct template, and is also described in Example 1 of International Patent Application No. PCT/US18/49996, which is incorporated herein in its entirety by reference. For example, a polynucleotide construct template used for generating the ceDNA vectors of the present disclosure according to Example 1 can be a ceDNA-plasmid, a ceDNA-Bacmid, and/or a ceDNA-baculovirus. Without being limited to theory, in a permissive host cell, in the presence of e.g., Rep, the polynucleotide construct template having two symmetric ITRs and an expression construct, where at least one of the ITRs is modified relative to a wild-type ITR sequence, replicates to produce ceDNA vectors. ceDNA vector production undergoes two steps: first, excision (“rescue”) of template from the template backbone (e.g., ceDNA-plasmid, ceDNA-bacmid, ceDNA-baculovirus genome etc.) via Rep proteins, and second, Rep mediated replication of the excised ceDNA vector.

### Example 2: Synthetic ceDNA Production Via Excision from a Double-Stranded DNA Molecule

[0574] Synthetic production of the ceDNA vectors is described in Examples 2-6 of International Patent Application No. PCT/US19/14122, filed Jan. 18, 2019, which is incorporated herein in its entirety by reference. One exemplary method of producing a ceDNA vector using a synthetic method that involves the excision of a double-stranded DNA molecule. In brief, a ceDNA vector can be generated using a double stranded DNA construct, e.g., see FIGS. 7A-8E of PCT/US19/14122. In some embodiments, the double stranded DNA construct is a ceDNA plasmid, e.g., see, e.g., FIG. 6 in International Patent Application No. PCT/US2018/064242, filed Dec. 6, 2018).

[0575] In some embodiments, a construct to make a ceDNA vector comprises a regulatory switch as described herein.

[0576] For illustrative purposes, Example 2 describes producing ceDNA vectors as exemplary closed-ended DNA vectors generated using this method. However, while ceDNA vectors are exemplified in this Example to illustrate in vitro synthetic production methods to generate a closed-ended DNA vector by excision of a double-stranded polynucleotide comprising the ITRs and expression cassette (e.g., nucleic acid sequence, e.g., heterologous nucleic acid sequence) followed by ligation of the free 3′ and 5′ ends as described herein, one of ordinary skill in the art is aware that one can, as illustrated above, modify the double stranded DNA polynucleotide molecule such that any desired closed-ended DNA vector is generated, including but not limited to, doggybone DNA, dumbbell DNA and the like. Exemplary ceDNA vectors for production of antibodies or fusion proteins that can be produced by the synthetic production method described in Example 2 are discussed in the sections entitled “III ceDNA vectors in general”. Exemplary antibodies and fusion proteins expressed by the ceDNA vectors are described in the section entitled “IIC Exemplary antibodies and fusion proteins expressed by the ceDNA vectors”.

[0577] The method involves (i) excising a sequence encoding the expression cassette from a double-stranded DNA construct and (ii) forming hairpin structures at one or more of the ITRs and (iii) joining the free 5′ and 3′ ends by ligation, e.g., by T4 DNA ligase.

[0578] The double-stranded DNA construct comprises, in 5′ to 3′ order: a first restriction endonuclease site; an upstream ITR; an expression cassette; a downstream ITR; and a second restriction endonuclease site. The double-stranded DNA construct is then contacted with one or more restriction endonucleases to generate double-stranded breaks at both of the restriction endonuclease sites. One endonuclease can target both sites, or each site can be targeted by a different endonuclease as long as the restriction sites are not present in the ceDNA vector template. This excises the sequence between the restriction endonuclease sites from the rest of the double-stranded DNA construct (see FIG. 9 of PCT/US19/14122). Upon ligation a closed-ended DNA vector is formed.

[0579] One or both of the ITRs used in the method may be wild-type ITRs. Modified ITRs may also be used, where the modification can include deletion, insertion, or substitution of one or more nucleotides from the wild-type ITR in the sequences forming B and B′ arm and/or C and C′ arm (see, e.g., FIGS. 6-8 and 10 FIG. 11B of PCT/US19/14122), and may have two or more hairpin loops (see, e.g., FIGS. 6-8 FIG. 11B of PCT/US19/14122) or a single hairpin loop (see, e.g., FIG. 10A-10B FIG. 11B of PCT/US19/14122). The hairpin loop modified ITR can be generated by genetic modification of an existing oligo or by de novo biological and/or chemical synthesis.

In a non-limiting example, ITR-6 Left and Right (SEQ ID NOS: 111 and 112), include 40 nucleotide deletions in the B-B′ and C-C′ arms from the wild-type ITR of AAV2. Nucleotides remaining in the modified ITR are predicted to form a single hairpin structure. Gibbs free energy of unfolding the structure is about −54.4 kcal/mol. Other modifications to the ITR may also be made, including optional deletion of a functional Rep binding site or a Trs site.

### Example 3: ceDNA Production Via Oligonucleotide Construction

[0580] Another exemplary method of producing a ceDNA vector using a synthetic method that involves assembly of various oligonucleotides, is provided in Example 3 of PCT/US19/14122, incorporated by reference in its entirety herein, where a ceDNA vector is produced by synthesizing a 5′ oligonucleotide and a 3′ ITR oligonucleotide and ligating the ITR oligonucleotides to a double-stranded polynucleotide comprising an expression cassette. FIG. 11B of PCT/US19/14122 shows an exemplary method of ligating a 5′ ITR oligonucleotide and a 3′ ITR oligonucleotide to a double stranded polynucleotide comprising an expression cassette.

[0581] The ITR oligonucleotides can comprise WT-ITRs (e.g., see FIG. 2A, FIG. 2C), or modified ITRs (e.g., see, FIG. 2B and FIG. 2D). (See e.g., FIGS. 6A, 6B, 7A and 7B of PCT/US19/14122, which is incorporated herein in its entirety). Exemplary ITR oligonucleotides include, but are not limited to SEQ ID NOS: 134-145 (e.g., see Table 7 in of PCT/US19/14122). Modified ITRs can include deletion, insertion, or substitution of one or more nucleotides from the wild-type ITR in the sequences forming B and B′ arm and/or C and C′ arm. ITR oligonucleotides, comprising WT-ITRs or mod-ITRs as described herein, to be used in the cell-free synthesis, can be generated by genetic modification or biological and/or chemical synthesis. The ITR oligonucleotides can comprise WT-ITRs, or modified ITRs (mod-ITRs) in symmetrical or asymmetrical configurations, as discussed herein.

### Example 4: ceDNA Production Via a Single-Stranded DNA Molecule

[0582] Another exemplary method of producing a ceDNA vector using a synthetic method is provided in Example 4 of PCT/US19/14122, incorporated by reference in its entirety herein, and uses a single-stranded linear DNA comprising two sense ITRs which flank a sense expression cassette sequence and are attached covalently to two antisense ITRs which flank an antisense expression cassette, the ends of which single stranded linear DNA are then ligated to form a closed-ended single-stranded molecule. One non-limiting example comprises synthesizing and/or producing a single-stranded DNA molecule, annealing portions of the molecule to form a single linear DNA molecule which has one or more base-paired regions of secondary structure, and then ligating the free 5′ and 3′ ends to each other to form a closed single-stranded molecule.

[0583] An exemplary single-stranded DNA molecule for production of a ceDNA vector comprises, from 5′ to 3′: a sense first ITR; a sense expression cassette sequence; a sense second ITR; an antisense second ITR; an antisense expression cassette sequence; and an antisense first ITR.

[0584] A single-stranded DNA molecule for use in the exemplary method of Example 4 can be formed by any DNA synthesis methodology described herein, e.g., in vitro DNA synthesis, or provided by cleaving a DNA construct (e.g., a plasmid) with nucleases and melting the resulting dsDNA fragments to provide ssDNA fragments.

[0585] Annealing can be accomplished by lowering the temperature below the calculated melting temperatures of the sense and antisense sequence pairs. The melting temperature is dependent upon the specific nucleotide base content and the characteristics of the solution being used, e.g., the salt concentration. Melting temperatures for any given sequence and solution combination are readily calculated by one of ordinary skill in the art.

[0586] The free 5′ and 3′ ends of the annealed molecule can be ligated to each other, or ligated to a hairpin molecule to form the ceDNA vector. Suitable exemplary ligation methodologies and hairpin molecules are described in Examples 2 and 3.

### Example 5: Purifying and/or Confirming Production of ceDNA

[0587] Any of the DNA vector products produced by the methods described herein, e.g., including the insect cell based production methods described in Example 1, or synthetic production methods described in Examples 2-4 can be purified, e.g., to remove impurities, unused components, or byproducts using methods commonly known by a skilled artisan; and/or can be analyzed to confirm that DNA vector produced, (in this instance, a ceDNA vector) is the desired molecule. An exemplary method for purification of the DNA vector, e.g., ceDNA is using Qiagen Midi Plus purification protocol (Qiagen) and/or by gel purification,

[0588] The following is an exemplary method for confirming the identity of ceDNA vectors.

[0589] ceDNA vectors can be assessed by identified by agarose gel electrophoresis under native or denaturing conditions as illustrated in FIG. 3D, where (a) the presence of characteristic bands migrating at twice the size on denaturing gels versus native gels after restriction endonuclease cleavage and gel electrophoretic analysis and (b) the presence of monomer and dimer (2×) bands on denaturing gels for uncleaved material is characteristic of the presence of ceDNA vector.

[0590] Structures of the isolated ceDNA vectors were further analyzed by digesting the purified DNA with restriction endonucleases selected for a) the presence of only a single cut site within the ceDNA vectors, and b) resulting fragments that were large enough to be seen clearly when fractionated on a 0.8% denaturing agarose gel (>800 bp). As illustrated in FIGS. 3C and 3D, linear DNA vectors with a non-continuous structure and ceDNA vector with the linear and continuous structure can be distinguished by sizes of their reaction products—for example, a DNA vector with a non-continuous structure is expected to produce 1 kb and 2 kb fragments, while a ceDNA vector with the continuous structure is expected to produce 2 kb and 4 kb fragments.

[0591] Therefore, to demonstrate in a qualitative fashion that isolated ceDNA vectors are covalently closed-ended as is required by definition, the samples were digested with a restriction endonuclease identified in the context of the specific DNA vector sequence as having a single restriction site, preferably resulting in two cleavage products of unequal size (e.g., 1000 bp and 2000 bp). Following digestion and electrophoresis on a denaturing gel (which separates the two complementary DNA strands), a linear, non-covalently closed DNA will resolve at sizes 1000 bp and 2000 bp, while a covalently closed DNA (i.e., a ceDNA vector) will resolve at 2× sizes (2000 bp and 4000 bp), as the two DNA strands are linked and are now unfolded and twice the length (though single stranded). Furthermore, digestion of monomeric, dimeric, and n-meric forms of the DNA vectors will all resolve as the same size fragments due to the end-to-end linking of the multimeric DNA vectors (see FIG. 3E).

[0592] As used herein, the phrase “assay for the Identification of DNA vectors by agarose gel electrophoresis under native gel and denaturing conditions” refers to an assay to assess the close-endedness of the ceDNA by performing restriction endonuclease digestion followed by electrophoretic assessment of the digest products. One such exemplary assay follows, though one of ordinary skill in the art will appreciate that many art-known variations on this example are possible. The restriction endonuclease is selected to be a single cut enzyme for the ceDNA vector of interest that will generate products of approximately ⅓× and ⅔× of the DNA vector length. This resolves the bands on both native and denaturing gels. Before denaturation, it is important to remove the buffer from the sample. The Qiagen PCR clean-up kit or desalting “spin columns,” e.g. GE HEALTHCARE ILUSTRA™ MICROSPIN™ G-25 columns are some art-known options for the endonuclease digestion. The assay includes for example, i) digest DNA with appropriate restriction endonuclease(s), 2) apply to e.g., a Qiagen PCR clean-up kit, elute with distilled water, iii) adding 10× denaturing solution (10×=0.5 M NaOH, 10 mM EDTA), add 10× dye, not buffered, and analyzing, together with DNA ladders prepared by adding 10× denaturing solution to 4×, on a 0.8-1.0% gel previously incubated with 1 mM EDTA and 200 mM NaOH to ensure that the NaOH concentration is uniform in the gel and gel box, and running the gel in the presence of 1× denaturing solution (50 mM NaOH, 1 mM EDTA). One of ordinary skill in the art will appreciate what voltage to use to run the electrophoresis based on size and desired timing of results. After electrophoresis, the gels are drained and neutralized in 1×TBE or TAE and transferred to distilled water or 1×TBE/TAE with 1×SYBR Gold. Bands can then be visualized with e.g. Thermo Fisher, SYBR® Gold Nucleic Acid Gel Stain (10,000× Concentrate in DMSO) and epifluorescent light (blue) or UV (312 nm). The foregoing gel-based method can be adapted to purification purposes by isolating the ceDNA vector from the gel band and permitting it to renature.

[0593] The purity of the generated ceDNA vector can be assessed using any art-known method. As one exemplary and non-limiting method, contribution of ceDNA-plasmid to the overall UV absorbance of a sample can be estimated by comparing the fluorescent intensity of ceDNA vector to a standard. For example, if based on UV absorbance 4 μg of ceDNA vector was loaded on the gel, and the ceDNA vector fluorescent intensity is equivalent to a 2 kb band which is known to be 1 μg, then there is 1 μg of ceDNA vector, and the ceDNA vector is 25% of the total UV absorbing material. Band intensity on the gel is then plotted against the calculated input that band represents—for example, if the total ceDNA vector is 8 kb, and the excised comparative band is 2 kb, then the band intensity would be plotted as 25% of the total input, which in this case would be 0.25 μg for 1.0 μg input. Using the ceDNA vector plasmid titration to plot a standard curve, a regression line equation is then used to calculate the quantity of the ceDNA vector band, which can then be used to determine the percent of total input represented by the ceDNA vector, or percent purity.

### Example 6: Pharmacology Study to Evaluate Biochemical Correction of Phenylalanine Levels in PAHe^{nu2} Mice by IV and Hydrodynamic Administration of ceDNA

[0594] It has previously been shown in International Application No. PCT/US2020/022595, incorporated by reference in its entirety herein, that using a murine model of PAH deficiency, the PAH^{enu2} mouse, two different ceDNA vectors, each with a wild-type left ITR and a truncation mutant right ITR, and having a transgene region encoding human PAH, when administered by hydrodynamic injection, expressed active PAH, which was able to systemically reduce phenylalanine levels. Further, International Application No. PCT/US2020/022595 demonstrated that administration of ceDNA containing a VD promoter linked to human PAH codon optimized version 2 (“Codop2”) resulted in decreased serum PHE levels, indicating sufficient PAH activity to correct blood phenylalanine levels in murine PKU as early as day 3.

[0595] ceDNA vectors were prepared and purified as described above in Examples 1 and 5.

[0596] The nucleic acid sequence of ceDNA containing codon optimized human PAH version 2 (ceDNA “hPAH Codop2”) is shown herein as SEQ ID NO: 192, and includes the following elements: left-ITR_v1: spacer_left-ITR_v2.1: VD_Promoter Set (VD): PmeI_site: Modified_Minimum_Consensus_Kozak: hPAH_codop_ORF_v2: PacI_site: WPRE_3pUTR: bGH/spacer: spacer_right-ITR_v1: right-ITR_v1 (ceDNA412).

[0597] The nucleic acid sequence of ceDNA containing human PAH cDNA (ceDNA VD promoter linked to hPAH cDNA without codon optimization) is shown herein as SEQ ID NO: 193, and includes the following elements: Left-ITR_v1: spacer_left-ITR_v1: VD_Promoter Set (VD) PmeI_site: Consensus_Kozak: hPAH_cDNA_ORF_v3: PacI_site: WPRE_3pUTR: bGH: spacer_right-ITR_v1: right-ITR_v1 (ceDNA802).

[0598] The nucleic acid sequence of ceDNA containing codon optimized human PAH version 2 r5-s29 (ceDNA “hPAH-r5-s29”), with specific cis-regulatory elements is shown herein as SEQ ID NO: 213, and includes the following elements: left-ITR_v1, spacer_left-ITR_v2, HS-CRM8_SERP_Enhancer_nospacer, HS-CRM8_SERP_Enhancer_nospacer, HS-CRM8_SERP_Enhancer_nospacer, BamHI_site, TTR-promoter-d5pUTR, MVM_intron, PmeI_site, Mod_Minimum_Consensus_Kozak, hPAH-r5-s29, PacI_site, WPRE_3pUTR, bGH, spacer_right-ITR_v1, right-ITR_v1 (ceDNA1530).

[0599] Each of the ceDNA PAH vectors (alone, without any LNP encapsulation) and the control were administered to mixed gender, age-matched PAH^{enu2} mice approximately 4-6 weeks old. The naked ceDNA vectors were dosed at 0.5 μg or 5 μg per animal (5 animals per group) for ceDNA412 and ceDNA802 and 0.5 μg or 1 μg per animal (5 animals per group) for ceDNA1530 by hydrodynamic intravenous injection via lateral tail vein in a dose volume of 90-100 ml/kg on day 0. Day 21 was the terminal time point.

[0600] A well-known method of introducing nucleic acid to the liver in rodents is by hydrodynamic tail vein injection. In this system, the pressurized injection in a large volume of non-encapsulated nucleic acid results in a transient increase in cell permeability and delivery directly into tissues and cells. This provides an experimental mechanism to bypass many of the host immune systems, such as macrophage delivery, providing the opportunity to observe delivery and expression in the absence of such activity.

[0601] The study design is shown below in Table 15.

TABLE 15

| | Animals | | | | | | | Terminal |
|---|---|---|---|---|---|---|---|---|
| Group | per | | | Dose | | Dose | Treatment | Time |
| No. | Group | Genotype | Treatment | Level | | Volume | Regimen, IV | Point |
| 1 | 5 | WT | PBS | NA | | 90-100 ml/kg | Once on | Day 21 |
| | | littermates | | | | (set volume) | | |
| 2 | 5 | PAH^{enu2} | PBS | NA | | | Day 0 by IV | |
| 3 | 5 | MUT | ceDNA412 (TR) | 0.5 | μg | | Hydrodynamic | |
| 4 | 5 | | ceDNA412 (TR) | 5.0 | μg | | | |
| 5 | 5 | | ceDNA802 (BIICs) | 5.0 | μg | | | |
| 6 | 5 | | ceDNA1530 (TR) | 0.5 | μg | | | |
| 7 | 5 | | ceDNA1530 (TR) | 1.0 | μg | | | |
| 8 | 5 | | ceDNA1274 LNP | 5 | mg/kg | 5 ml/kg | Once on | |

| | | | |
|---|---|---|---|
| | | formulation 1 | Day 0 by IV |
| 9 | 5 | ceDNA274 LNP | |
| | | formulation 2 | |

No. = Number; IV = intravenous; WT = wild type; MUT = mutant.

[0602] Test articles were supplied in a concentrated stock and stored at −4° C. until use. Formulations were not vortexed or centrifuged. Groups were housed in clear polycarbonate cages with contact bedding on a ventilated rack in a procedure room. Food and filtered tap water acidified with 1N HCl to a targeted pH of 2.5-3.0 were be provided to the animals ad libitum.

[0603] Blood was collected at interim and terminal time points as follows in Tables 16A and 16B, respectively.

TABLE 16A
Blood Collection (Interim)

| | Whole Blood Sample Collection Times | |
|---|---|---|
| | Saphenous Only | |
| Group | (Orbital by permission of Vet Staff) | |
| Number | Serum^{a} | |
| 1-9 | | FASTED |
| | | Day -3, 4, 7, 14 |
| 1, 2, 8 & 9 | Day 0 | |
| | 6 hours post Test Material | |
| | dose (±5%) | |
| Volume / | ~150 μL whole blood | ~50 μL whole blood |
| Portion | | |
| Processing | One (1) aliquot | One (1) aliquot |
| | (Charles River) | (Pure Honey) |
| Storage | Frozen at nominally −70° C. | Frozen at nominally −70° C. |

^{a}Whole blood was collected into serum separator tubes, with clot activator; MOV = maximum obtainable volume

TABLE 16B
Terminal Blood and Tissue Collection

| Group | Sample Collection Times | |
|---|---|---|
| Number | Serum^{a} | Liver |
| 1-9 | FASTED: On Day 21 | |
| 1, 2, 8 & 9 | | FASTED: On Day 21 |
| Volume/ | MOV | Whole organ, divided |
| Portion | | |
| Processing | Two (2) aliquots | 2 x ~50 mg pieces, not weighed |
| | (Pure Honey) | and snap frozen individually |
| | | (Pure Honey) |
| Storage | Frozen at nominally −70° C. | Frozen at nominally −70° C. |

^{a}Whole blood collected into serum separator tubes, with clot activator; MOV = maximum obtainable volume

### Study Details are Provided as Follows:

[0604] Species (number, sex, age): 40+2 spare PAH^{enu2} Mutant (MUT) mice (mixed gender, ˜5-10 weeks old, age-matched at arrival); 5 Wild Type (WT); mixed gender, littermates; age-matched. Animals were ˜10-14 weeks of at dose initiation.
[0605] Cage Side Observations: Cage side observations were performed daily.
[0606] Class of Compound: Recombinant DNA vector, ceDNA
[0607] Body Weights: Body weights for all animals, as applicable) were recorded on Days −3, 0, 1, 2, 4, 7, 14 & 21 (prior to euthanasia). Additional body weights were recorded as requested.
[0608] Dose Formulation: Test articles supplied in a concentration stock. Stock diluted with PBS immediately prior to use. Prepared materials stored at ˜4° C. (or on wet ice) if dosing is not performed immediately.
[0609] Dose Administration: Test Materials for Groups 1-7 were dosed on Day 0 by hydrodynamic IV administration, at a set volume per animal, 90-100 ml/kg (dependent on the lightest animal in the group) via lateral tail vein. Groups 8 and 9 were dosed on Day 0 by hydrodynamic IV administration, at a set volume per animal, 5 ml/kg.
[0610] Fasting Prior to Blood Collection and necropsy (for serum and tissues): All animals (all groups) were fasted for a minimum of 4 hours prior to all blood collections and necropsy: Days −3, 4, 7, 14 & 21. Animals will not be fasted on Day 0.
[0611] Interim Blood Collection: All animals in Groups 1, 2, 8 & 9 only, will have interim blood collected on Day 0; 6 hours post Test Material dose (±5%).

[0612] All animals in Groups 1-9 will have blood collected on Days −3, −4, 0, 1, 2, 4 3, & 7, 14 & 21. Animals will have whole blood for fasted serum collection.
[0613] Euthanasia & Terminal Blood Collection: On Day 21, after a minimum 4 hour fast, will be euthanized by CO₂ asphyxiation followed by thoracotomy and exsanguination.
[0614] Phenylalanine (PHE) Levels: Serum samples were analyzed by the Pure Honey for PHE levels.
[0615] Activity Levels: Two (2) frozen liver samples were analyzed by Pure Honey for Activity levels.

### Results

[0616] As shown in FIGS. 5A-5C, a ceDNA vector comprising a PAH nucleic acid sequence that has been codon optimized (ceDNA412; hPAH_codop_ORF_v2) corrected phenylalanine level (“PHE μM”) to below target concentration at a higher rate than the ceDNA802 (hPAH native cDNA sequence) at both a 0.5 μg and 5 μg hydrodynamic dose, while ceDNA802 did not correct PHE concentration. Results are shown for individual mice over 21 days. ceDNA1530 is a ceDNA vector comprising a PAH nucleic acid sequence that has been codon optimized (ceDNA1530; hPAH-r5-s29) with a 3×HS-CRM8_SERP_Enhancer, a TTR-promoter-d5pUTR and MVM_intron. As shown in FIGS. 5D and 5E, ceDNA1530 was not as effective at correcting PHE concentration at a 0.5 μg dose, but reached target PHE levels at a 1 μg dose.

### Example 7: Pharmacology Study to Evaluate Biochemical Correction of Phenylalanine Levels in PAH^{en2} Mice by Hydrodynamic Administration of ceDNA-Testing of an Autoregulatory Mutant ceDNA1274

[0617] ceDNA vectors were prepared and purified as described above in Examples 1 and 5.

[0618] The nucleic acid sequence of ceDNA containing codon optimized human PAH version 2 (ceDNA “hPAH Codop2”) is shown herein as SEQ ID NO: 192, and includes the following elements: left-ITR_v1: spacer_left-ITR_v2.1: VD_Promoter Set (VD): PmeI_site: Modified_Minimum_Consensus_Kozak: hPAH_codop_ORF_v2: PacI_site: WPRE_3pUTR: bGH/spacer: spacer_right-ITR_v1: right-ITR_v1 (ceDNA412)

[0619] The nucleic acid sequence of ceDNA containing codon optimized human PAH version 2 (ceDNA “hPAH Codop2”) with specific cis-regulatory elements is shown herein as SEQ ID NO: 194, and includes the following elements: left-ITR_v1, spacer_left-ITR_v2.1, 3×SerpEnh-TTRe-TTRm, MVM_intron, PmeI_site, Mod_Minimum_Consensus_Kozak, hPAH_codop_ORF_v2, PacI_site, WPRE_3pUTR, bGH, spacer_right-ITR_v1, right-ITR_v1 (ceDNA1132).

[0620] The nucleic acid sequence of ceDNA containing codon optimized human PAH version 2 (ceDNA “hPAH Codop2”) with a 29 amino acid deletion, with specific cis-regulatory elements is shown herein as SEQ ID NO: 195, and includes the following elements: left-ITR_v1, spacer_left-ITR_v2.1, VD_PromoterSet, PmeI_site, Mod_Minimum_Consensus_Kozak, hPAH_codop_ORF_v2_delta1-29aa, PacI_site, WPRE_3pUTR, bGH, spacer_right-ITR_v1, right-ITR_v1 (ceDNA1274).

[0621] The nucleic acid sequence of ceDNA codon optimized human PAH version 2 (ceDNA “hPAH_codop_ORF_v2”), with specific cis-regulatory elements is shown herein as SEQ ID NO: 210, and includes the following elements: left-ITR_v1, spacer_left-ITR_v2.1, 3×VanD_TTRe_PromoterSet_v2, PmeI_site, Mod_Minimum_Consensus_Kozak, hPAH_codop_ORF_v2, PacI_site, WPRE_3pUTR, bGH, spacer_right-ITR_v1, right-ITR_v1 (ceDNA1527).

[0622] Each of the ceDNA PAH vectors (alone, without any LNP encapsulation) and the control were administered to mixed gender, age-matched PAHenu2 mice approximately 4-6 weeks old. The naked ceDNA vectors were dosed at 0.5 μg or 5 μg per animal (5 animals per group) for ceDNA412, ceDNA1132 and ceDNA1527 and 5 μg per animal (5 animals per group) for ceDNA1527 by hydrodynamic intravenous injection via lateral tail vein in a dose volume of 90-100 ml/kg on day 0. Day 28 was the terminal time point. The study design is shown below in Table 17.

TABLE 17

| | | | | Dose | | Dosing | |
|---|---|---|---|---|---|---|---|
| Group | No. of | | | Levels | | Regimen | Terminal |
| No. | Animals | Genotype | Test Material | (μg) | Dose Volume | ROA | Time Point |
| 1 | 5 | WT | PBS | NA | 90-100 ml/kg | ONCE ON | Day 28 |
| 2 | 5 | PAH^{enu2} | PBS | NA | (set volume) | Day 0 by | |
| 3 | 5 | MUT | ceDNA412 | 0.5 | | Hydrodynamic | |
| 4 | 5 | | ceDNA412 | 5.0 | | IV | |
| 5 | 5 | | ceDNA1132 | 0.5 | | | |
| 6 | 5 | | ceDNA1132 | 5.0 | | | |
| 7 | 5 | | ceDNA1274 | 5.0 | | | |
| 8 | 5 | | ceDNA1527 | 0.5 | | | |
| 9 | 5 | | ceDNA1527 | 5.0 | | | |

No. = Number; IV = intravenous; ROA = route of administration; WT = wild type; MUT = homozygous mutant; min = minute; hr = hour

[0623] Test articles were supplied in a concentrated stock and stored at ˜4° C. until use. Formulations were not vortexed or centrifuged. Groups were housed in clear polycarbonate cages with contact bedding on a ventilated rack in a procedure room. Animals were provided ad libitum Mouse Diet 5058 and filtered tap water acidified with 1N HCl to a targeted pH of 2.5-3.0.

[0624] Blood was collected at interim and terminal time points as follows in Tables 18A and 18B, respectively.

TABLE 18A
Blood Collection (Interim)

| | Whole Blood Sample Collection Times |
|---|---|
| Group | Saphenous |
| Number | Serum^{a} |
| 1-9 | FASTED |
| | Day -5, 3, 7, 14, & 21 |
| Volume/Portion | ~50 μL whole blood |
| Processing | One (1) aliquot |
| | (Pure Honey) |
| Storage | Frozen at nominally −70° C. |

^{a}Whole blood will be collected into serum separator tubes, with clot activator

TABLE 18B
Terminal Blood and Tissue Collection

| | Sample Collection Times |
|---|---|
| | Terminal Whole Blood |
| Group | (cardiac) |
| Number | Serum^{a} |
| 1-9 | FASTED |
| | Day 29 |
| Portion | MOV |
| Processing/ | One (1) aliquot processed plasma |
| Storage | frozen at nominally −70° C. |

^{a}Whole blood will be collected into serum separator tubes, with clot activator
MOV = maximum obtainable volume

### Study Details are Provided as Follows:

[0625] Species (number, sex, age): 40+2 spare PAHenu2 Mutant (MUT) mice (mixed gender, ˜5-10 weeks old, age-matched at arrival); 5 Wild Type (WT); mixed gender, littermates; age-matched. Animals were ˜10-14 weeks of at dose initiation.
[0626] Cage Side Observations: Cage side observations were performed daily.
[0627] Clinical Observations: Clinical observations were performed ˜1, ˜5-6 and ˜24 hours post the Day 0 Test Material dose, as applicable for remaining groups.
[0628] Class of Compound: Recombinant DNA vector: ceDNA.
[0629] Body Weights: Body weights for all animals were recorded on Days −5, 0, 1, 2, 3, 7, 14, 21 & 28 (prior to euthanasia). Additional body weight may be recorded as requested.
[0630] Dose Formulation: Test articles were supplied in a concentration stock. Stock was warmed to room temperature and diluted with the provided PBS immediately prior to use. Prepared materials may be stored at ˜4° C. if dosing is not performed immediately.
[0631] Dose Administration: Test Materials for Groups 1-9 were dosed on Day 0 by hydrodynamic IV administration, at a set volume per animal, 90-100 ml/kg (dependent on the lightest animal in the group) via lateral tail vein.
[0632] Fasting Prior to Blood Collection: All animals (all groups) were fasted for a minimum of 4 hours prior to the all interim and terminal blood collections: Days −5, 3, 7, 14, 21 & 28.
[0633] Food was removed and bedding changed. Food was be returned at the conclusion of each interim blood collections for a fast of no more than 8 hours in duration.
[0634] Interim Blood Collection: All animals in Groups 1-9 had interim blood collected on Days −5, 3, 7, 14 & 21. Animals had whole blood for fasted serum collection. After collection animals received 0.5-1.0 mL lactated Ringer's, subcutaneously.
[0635] Blood Collection: Whole blood for serum was collected by saphenous vein. Whole blood was collected into a serum separator with clot activator tube and processed into one (1) aliquot of serum per facility SOPs. All samples were stored at nominally −70° C. until shipped to on dry ice.
[0636] Unscheduled Euthanasia: Terminal tissues were collected from moribund animals that are euthanized prior to their scheduled time point. If possible, tissues were collected and stored from animals that are found dead.
[0637] Euthanasia: On Day 28, after a minimum 4 hours fast, animals were euthanized by CO2 asphyxiation followed by thoracotomy and exsanguination.
[0638] Terminal Blood: Whole blood from exsanguination was collected into a serum separator with clot activator tube and processed into two (2) aliquot of serum per facility SOPs. All samples were stored at nominally −70° C. until shipped to on dry ice.
[0639] Phenylalanine (PHE) Levels: Serum samples were analyzed by the Pure Honey for PHE levels.
[0640] Activity Levels: Two (2) frozen liver samples were analyzed by Pure Honey for Activity levels.

### Results

[0641] As shown in the right panel of FIG. 6, when dosed hydrodynamically at 5 μg, all constructs tested in this study (ceDNA412, ceDNA1132, ceDNA1274 and ceDNA1527) corrected average PHE levels (PHE μM) to below target concentration (less than 350 μM) through day 7 of the study. PHE levels begin rising again around day 14 of the study. FIG. 6A shows the wild type mouse controls, which had normal PHE levels (below target concentration), as expected, and PAH^{enu2} mice, dosed with vehicle, had high levels of PHE, also as expected. While ceDNA vectors with codon optimized human PAH version 2 corrected PHE levels close to the target correction at a dose of 0.5 μg, the level of correction never reached below the target.

[0642] ceDNA1132 was previously examined in an in vivo study, where n=2/3 animals resulted in PHE correction (data not shown). Because ceDNA1132 expressed well in vitro, it was tested again in vivo to increase n. As shown in FIGS. 7D and 7E, at a 5 μg dose, all 5 animals in the ceDNA1132 and ceDNA1274 groups showed corrected PHE levels (PHE μM) to below target concentration (less than 350 μM) at day 7. There was only 1 non-responder in the ceDNA412 and ceDNA1527 groups. As also shown in FIGS. 7A, 7C, and 7F, at a dose of 0.5 μg, there was no distinguishable difference in PHE correction among the constructs tested; however it is considered that ceDNA1527 may be more potent if single non-responder is excluded. Taken together, the data show that all of the constructs tested in this study corrected average PHE levels below target concentration through at least day 7 when dosed at 5 μg, hydrodynamically. In some groups, correction below target levels was maintained for as long as 20 days or more in individual mice when dosed at 5 μg, hydrodynamically.

### Example 8: Pharmacology Study to Evaluate Biochemical Correction of Phenylalanine Levels in PAHe^{nu2} Mice by Hydrodynamic Administration of ceDNA-Effect of Different Promoters on PHE Correction

[0643] ceDNA vectors were prepared and purified as described above in Examples 1 and 5.

[0644] The nucleic acid sequence of ceDNA containing codon optimized human PAH version 2 (ceDNA “hPAH Codop2”) is shown herein as SEQ ID NO: 192, and includes the following elements: left-ITR_v1: spacer_left-ITR_v2.1: VD_Promoter Set (VD): PmeI_site: Modified_Minimum_Consensus_Kozak: hPAH_codop_ORF_v2: PacI_site: WPRE_3pUTR: bGH/spacer: spacer_right-ITR_v1: right-ITR_v1 (ceDNA412).

[0645] The nucleic acid sequence of ceDNA containing codon optimized human PAH version 2 r5-s29 (ceDNA “hPAH-r5-s29”) with specific cis-regulatory elements is shown herein as SEQ ID NO: 196, and includes the following elements: left-ITR_v1, spacer_left-ITR_v2.1, 3×VanD_TTRe_PromoterSet, PmeI_site, Mod_Minimum_Consensus_Kozak, hPAH-r5-s29::hIVS1B, PacI_site, WPRE_3pUTR, bGH, spacer_right-ITR_v1, right-ITR_v1 (ceDNA1414).

[0646] The nucleic acid sequence of ceDNA containing codon optimized human PAH version 2 r5-s29 (ceDNA “hPAH-r5-s29”), with specific cis-regulatory elements is shown herein as SEQ ID NO: 197, and includes the following elements: left-ITR_v1, spacer_left-ITR_v2.1, 3×VanD_TTRe_PromoterSet, PmeI_site, Mod_Minimum_Consensus_Kozak, hPAH-r5-s29::hIVS1B_33bpFlanks, PacI_site, WPRE_3pUTR, bGH, spacer_right-ITR_v1, right-ITR_v1 (ceDNA1416).

[0647] The nucleic acid sequence of ceDNA codon optimized human PAH version 2 r5-s29 (ceDNA “hPAH-r5-s29”) with specific cis-regulatory elements is shown herein as SEQ ID NO: 198, and includes the following elements: left-ITR_v1, spacer_left-ITR_v2.1, 3×VanD_TTRe_PromoterSet, PmeI_site, Mod_Minimum_Consensus_Kozak, hPAH-r5-s29::mod-Intron_oIVS-v2_33bpFlanks, PacI_site, WPRE_3pUTR, bGH, spacer_right-ITR_v1, right-ITR_v1 (ceDNA1428).

[0648] The nucleic acid sequence of ceDNA codon optimized human PAH version 2 (ceDNA “hPAH_codop_ORF_v2”), with specific cis-regulatory elements is shown herein as SEQ ID NO: 211, and includes the following elements: left-ITR_v1, spacer_left-ITR_v2.1, CpGmin_hAAT_Promoter_Set, PmeI_site, Mod_Minimum_Consensus_Kozak, hPAH_codop_ORF_v2, PacI_site, WPRE_3pUTR, bGH, spacer_right-ITR_v1, right-ITR_v1 1 (ceDNA1528).

[0649] Each of the ceDNA PAH vectors (alone, without any LNP encapsulation) and the control were administered to mixed gender, age-matched PAHenu2 mice approximately 4-6 weeks old. The naked ceDNA vectors were dosed at 0.5 μg or 5 μg per animal (5 animals per group) by hydrodynamic intravenous injection via lateral tail vein in a dose volume of 90-100 ml/kg on day 0. Day 28 was the terminal time point. The study design is shown below in Table 19.

TABLE 19

| | | | | Dose | | Dosing | |
|---|---|---|---|---|---|---|---|
| Group | No. of | | | Levels | | Regimen | Terminal |
| No. | Animals | Genotype | Test Material | (μg) | Dose Volume | ROA | Time Point |
| 1 | 5 | WT | PBS | NA | 90-100 ml/kg | ONCE ON | Day 28 |
| 2 | 5 | PAH^{enu2} | PBS | NA | (set volume) | Day 0 by | |
| 3 | 5 | MUT | ceDNA412 | 0.5 | | Hydrodynamic | |
| 4 | 5 | | ceDNA412 | 5.0 | | IV | |
| 5 | 5 | | ceDNA1414 | 0.5 | | | |
| 6 | 5 | | ceDNA1414 | 5.0 | | | |
| 7 | 5 | | ceDNA1416 | 0.5 | | | |
| 8 | 5 | | ceDNA1416 | 5.0 | | | |
| 9 | 5 | | ceDNA1428 | 0.5 | | | |
| 10 | 5 | | ceDNA1428 | 5.0 | | | |
| 11 | 5 | | ceDNA1528 | 0.5 | | | |
| 12 | 5 | | ceDNA1528 | 5.0 | | | |

No. = Number; IV = intravenous; ROA = route of administration; WT = wild type; MUT = homozygous mutant; min = minute; hr = hour

[0650] Blood was collected at interim and terminal time points as follows in Tables 20A and 20B, respectively.

TABLE 20A
Blood Collection (Interim)

| | Whole Blood Sample Collection Times |
|---|---|
| | Saphenous Only |
| Group | (Orbital by permission of Vet Staff) |
| Number | Serum^{a} |
| 1-12 | FASTED |
| | Day -3, 4, 7, 14, & 21 |
| Volume/ | ~50 μL whole blood |
| Portion | |
| Processing | One (1) aliquot |
| | (Pure Honey) |
| Storage | Frozen at nominally −70° C. |

^{a}Whole blood will be collected into serum separator tubes, with clot activator

TABLE 20B
Terminal Blood and Tissue Collection

| | Sample Collection Times |
|---|---|
| | Terminal Whole Blood |
| Group | (cardiac) |
| Number | Serum^{a} |
| 1-12 | FASTED |
| | Day 28 |
| Portion | MOV |
| Processing/ | One (1) aliquot processed plasma |
| Storage | frozen at nominally −70° C. |

^{a}Whole blood will be collected into serum separator tubes, with clot activator, MOV = maximum obtainable volume

### Study Details are Provided as Follows:

[0651] Species (number, sex, age): 55+2 spare PAH^{enu2} Mutant (MUT) mice (mixed gender, ˜5-10 weeks old, age-matched at arrival); 5 Wild Type (WT); mixed gender, littermates; age-matched. Animals were ˜10-14 weeks of at dose initiation.
[0652] Cage Side Observations: Cage side observations were performed daily.
[0653] Clinical Observations: Clinical observations were performed ˜1, ˜5-6 and ˜24 hours post the Day 0 Test Material dose, as applicable for remaining groups.
[0654] Class of Compound: Recombinant DNA vector, ceDNA.
[0655] Body Weights: Body weights for all animals were recorded on Days −5, 0, 1, 2, 3, 7, 14, 21 & 29 (prior to euthanasia). Additional body weight may be recorded as requested.
[0656] Dose Formulation: Test articles were supplied in a concentration stock. Stock was warmed to room temperature and diluted with the provided PBS immediately prior to use. Prepared materials may be stored at ˜4° C. if dosing is not performed immediately.
[0657] Dose Administration: Test Materials for Groups 1-12 were dosed on Day 0 by hydrodynamic IV administration, at a set volume per animal, 90-100 ml/kg (dependent on the lightest animal in the group) via lateral tail vein.
[0658] Fasting Prior to Blood Collection: All animals (all groups) were fasted for a minimum of 4 hours prior to the all interim and terminal blood collections: Days −5, 3, 7, 14, 21 & 29.

[0659] Food was removed and bedding changed. Food will be returned at the conclusion of each interim blood collections for a fast of no more than 8 hours in duration.
[0660] Interim Blood Collection: All animals in Groups 1-12 will have interim blood collected on Days −5, 3, 7, 14 & 21. Animals will have whole blood for fasted serum collection. After collection animals will receive 0.5-1.0 mL lactated Ringer's, subcutaneously
[0661] Blood Collection: Whole blood for serum was be collected by saphenous vein. Whole blood was collected into a serum separator with clot activator tube and processed into one (1) aliquot of serum per facility SOPs. All samples were be stored at nominally −70° C. until shipped to on dry ice.
[0662] Unscheduled Euthanasia: Terminal tissues were collected from moribund animals that are euthanized prior to their scheduled time point. If possible, tissues will be collected and stored from animals that are found dead.
[0663] Euthanasia: On Day 29, after a minimum 4 hours fast, animals were euthanized by CO2 asphyxiation followed by thoracotomy and exsanguination.
[0664] Terminal Blood: Whole blood from exsanguination was collected into a serum separator with clot activator tube and processed into two (2) aliquot of serum per facility SOPs. All samples were stored at nominally −70° C. until shipped to on dry ice.
[0665] Phenylalanine (PHE) Levels: Serum samples were analyzed by the Pure Honey for PHE levels.
[0666] Activity Levels: Two (2) frozen liver samples were analyzed by Pure Honey for Activity levels.

### Results

[0667] The present study tested two codon optimized human PAH sequences (codon optimized human PAH version 2 and codon optimized human PAH version 2 r5-s29 in combination with different promoters or combinations of cis-regulatory elements. Specifically, the following constructs were tested, each of which had a different combination of promoter, codon optimized sequence, CpG content (e.g., CpGmin), intron, etc.

TABLE 21

| ceDNA | Construct features |
|---|---|
| ceDNA412 | 1× hSerpEnh (VD)_PromoterSet ∥ hPAH_codop_ORF_v2 |
| ceDNA1414 | 3× hSerpEnh (VanD)_TTRe_PromoterSet ∥ |
| | hPAH-r5-s29::hIVS1B ∥ WPRE_3pUTR |
| ceDNA1416 | 3× hSerpEnh (VanD)_TTRe_PromoterSet ∥ hPAH-r5-s29:: |
| | hIVS1B_33bpFlanks ∥ WPRE_3pUTR |
| ceDNA1428 | 3× hSerpEnh (VanD)_TTRe_PromoterSet ∥ hPAH-r5-s29:: |
| | mod-Intron_oIVS-v2_33bpFlanks ∥ WPRE_3pUTR |
| ceDNA1528 | CpGmin_hAAT_Promoter_Set ∥ hPAH_codop_ORF_v2 |

[0668] As shown in FIGS. 8A-8B, 9A-9E, and 10A-10E, 11A-11B, 12A-12E, 13A-13E, and 14A-14E, at a 5 μg dose, ceDNA1416, ceDNA1428, and ceDNA1528, but not ceDNA1414 groups showed acute correction of PHE levels (PHE μM) to below target concentration (less than 350 μM) in 5/5 mice within 7 days. As shown in FIGS. 8A-8r and 9A-9E, the data at the 0.5 μg dose suggests that ceDNA1416 and ceDNA1528 may be more potent than ceDNA412 (4/5 mice showed correction of PHE levels (PHE μM) to below target concentration (less than 350 μM) compared to 2/5 mice for ceDNA412 after 7 days). Based on this data, it is possible to conclude that the CpGmin_hAAT_Promoter_Set may show improvement over the standard VD Promoter. 3×VanD_TTRe is also a strong promoter, but further experimentation will be required for comparison to VanD (VD) Promoter in this data set.

[0669] As shown in FIGS. 11A-11B, 12A-12E, and 13A-13E, all of the mice (5/5) in the ceDNA412 group (5 μg dose) showed correction of PHE levels (PHE μM) to below target concentration (less than 350 μM) for the entire 28-day duration of the study. This result has not been seen before, and suggests a surprising durability of gene expression and efficacy. The other codon optimized constructs tested showed expected Phe increase after day 14 (at a 5 μg dose).

[0670] Finally, a further study was carried out testing codon optimized human PAH sequences in combination with different promoters or combinations of cis-regulatory elements. Specifically, the following constructs were tested, each of which had a different combination of promoter, codon optimized sequence, CpG content (e.g., CpGmin), intron, etc.

TABLE 22

| ceDNA | Construct features |
|---|---|
| ceDNA412 | 1× VD_PromoterSet ∥ hPAH_codop_ORF_v2 |
| ceDNA1430 | 3× hSerpEnh (VanD)_TTRe_PromoterSet ∥ |
| | hPAH_codop_ORF_v2_mIVS-intron1B_33bpFlanks ∥ WPRE_3pUTR |
| ceDNA1432 | 3× hSerpEnh (VanD)_TTRe_PromoterSet ∥ |
| | hPAH_codop_ORF_v2_modified_Intron1_33bpFlanks ∥ WPRE_3pUTR |
| ceDNA1473 | 5× HNF1 ∥ Pro-Albumin Enh ∥ TTR promoter ∥ hPAH_ORF_codop_v2 |
| ceDNA1474 | 5× HNF1 ∥ Pro-Albumin Enh ∥ 3× VanD-TTRe ∥ TTR promoter ∥ |
| | hPAH_ORF_codop_v2 |
| ceDNA1436 | hAAT(979)_PromoterSet ∥ hPAH_codop_ORF_v2 ∥ WPRE_3pUTR |
| ceDNA1471 | 3× HNF1-4 ∥ Pro-Albumin Enh ∥ TTR promoter ∥ hPAH_ORF_codop_v2 |
| ceDNA1472 | 3× HNF1-4 ∥ Pro-Albumin Enh ∥ 3× VanD-TTRe ∥ TTR promoter ∥ |
| | hPAH_ORF_codop_v2 |

[0671] All mice were administered a 5 μg dose, hydrodynamically. Surprisingly, as shown in FIGS. 14A-14I, particular combinations of cis-regulatory elements with the codon optimized sequences showed correction of PHE levels (PHE μM) to below target concentration (less than 350 μM). In particular, ceDNA1471, which has the promoter combination 3×HNF1-4∥Pro-Albumin Enh∥TTR promoter lowers PHE concentration below target values at a 5 μg dose, showing greater potency than ceDNA412 (VD_PromoterSet∥hPAH_codop_ORF_v2) in this study.

### Example 9: Pharmacology Study to Evaluate Biochemical Correction of Phenylalanine Levels in PAHe^{nu2} Mice by Hydrodynamic Administration of ceDNA-Effect of Different Promoters or Promoter Sets and Different ORF's on PHE Correction

[0672] ceDNA Constructs

[0673] This study tested ceDNA vectors having different promoters or promoter sets (i.e., hAAT promoter and VD promoter set) and codon optimized PAH sequences or ORFs (i.e., human PAH cDNA with or without CpG minimization and human PAH version 2). ceDNA vectors were prepared and purified as described above in Examples 1 and 5.

[0674] The nucleic acid sequence of ceDNA containing codon optimized human PAH version 2 (ceDNA “hPAH Codop2”) is shown herein as SEQ ID NO: 192, and includes the following elements: left-ITR_v1: spacer_left-ITR_v2.1: VD_Promoter Set: PmeI_site: Modified_Minimum_Consensus_Kozak: hPAH_codop_ORF_v2: PacI_site: WPRE_3pUTR: bGH/spacer: spacer_right-ITR_v1: right-ITR_v1 (ceDNA412). ceDNA412 served as a control in this study described in Example 9.

[0675] The nucleic acid sequence of ceDNA containing codon optimized human PAH version 2 ORF (hPAH_codop_ORF_v2), with specific chimeric intron (mIVS-intron1B) and intron flanking region (33bpFlanks), is shown herein as SEQ ID NO: 546 and includes the hAAT promoter in combination with the Pro-Albumin enhancer and 6 copies of hepatic nuclear factors 1 and 4 binding sites (3×HNF1-4) (ceDNA1476).

[0676] The nucleic acid sequence of ceDNA containing codon optimized human PAH version 2 ORF (hPAH_codop_ORF_v2), with specific chimeric intron (mIVS-intron1B) and intron flanking region (33bpFlanks), is shown herein as SEQ ID NO: 549 and includes the hAAT promoter in combination with the Pro-Albumin enhancer and 5 copies of hepatic nuclear factors 1 binding sites HNF1 (5×HNF1) (ceDNA1479).

[0677] The nucleic acid sequence of ceDNA containing codon optimized human PAH CpG minimized cDNA version 1 ORF (hPAH-cDNA_0CpG1_ORF) is shown herein as SEQ ID NO: 562 and includes the VD_Promoter Set (ceDNA1939).

[0678] The nucleic acid sequence of ceDNA containing codon optimized human PAH CpG minimized cDNA version 2 ORF (hPAH-cDNA_0CpG2_ORF) is shown herein as SEQ ID NO: 563 and includes the VD_Promoter Set (ceDNA1940).

[0679] The nucleic acid sequence of ceDNA containing codon optimized human PAH CpG minimized cDNA version 3 ORF (hPAH-cDNA_0CpG3_ORF) is shown herein as SEQ ID NO: 564 and includes the VD_Promoter Set (ceDNA1941).

[0680] The nucleic acid sequence of ceDNA containing codon optimized human PAH CpG minimized cDNA version 4 ORF (hPAH-cDNA_0CpG4_ORF) is shown herein as SEQ ID NO: 565 and includes the VD_Promoter Set (ceDNA1942).

[0681] The nucleic acid sequence of ceDNA containing codon optimized human PAH cDNA version 1 ORF without CpG minimization (hPAH-cDNA_1_ORF) is shown herein as SEQ ID NO: 566 and includes the VD_Promoter Set (ceDNA1943).

[0682] The nucleic acid sequence of ceDNA containing codon optimized human PAH cDNA version 2 ORF without CpG minimization (CpG=99) (hPAH-cDNA_2_ORF) is shown herein as SEQ ID NO: 567 and includes the VD_Promoter Set (ceDNA1944).

[0683] The features of the ceDNA vectors used in this study and as described above are summarized below in Table 23.

TABLE 23
Construct features of ceDNA vectors in Example 9 study

| ceDNA | Construct features |
|---|---|
| ceDNA412 | 1× VD_PromoterSet ∥ hPAH_codop_ORF_v2 |
| ceDNA1476 | 3× HNF1-4 ∥ Pro-Albumin Enh ∥ hAAT promoter ∥ |
| | hPAH_codop_ORF_v2_mIVS-intron1B_33bpFlanks |
| ceDNA1479 | 5× HNF1 ∥ Pro-Albumin Enh ∥ hAAT promoter ∥ |
| | hPAH_codop_ORF_v2_mIVS-intron1B_33bpFlanks |
| ceDNA1939 | 1× VD_PromoterSet ∥ hPAH-cDNA_0CpG1_ORF |
| ceDNA1940 | 1× VD_PromoterSet ∥ hPAH-cDNA_0CpG2_ORF |
| ceDNA1941 | 1× VD_PromoterSet ∥ hPAH-cDNA_0CpG3_ORF |
| ceDNA1942 | 1× VD_PromoterSet ∥ hPAH-cDNA_0CpG4_ORF |
| ceDNA1943 | 1× VD_PromoterSet ∥ hPAH-cDNA_1_ORF |
| ceDNA1944 | 1× VD_PromoterSet ∥ hPAH-cDNA_2_ORF (CpG = 99) |

### Study Design

[0684] Each of the ceDNA PAH vectors (alone, without any LNP encapsulation) and the control were administered to mixed gender, age-matched PAHenu2 mice approximately 4-6 weeks old. The naked ceDNA vectors were dosed at 0.5 μg per animal (5 animals per group) by hydrodynamic intravenous injection via lateral tail vein in a dose volume of 90-100 ml/kg on day 0. Day 28 was the terminal time point. The study design is as shown below in Table 24.

TABLE 24
Test material administration in Example 9 study

| | | | | Dose | | Dosing | |
|---|---|---|---|---|---|---|---|
| Group | No. of | | | Levels | | Regimen | Terminal |
| No. | Animals | Genotype | Test Material | (μg) | Dose Volume | ROA | Time Point |
| 1 | 5 | WT | PBS | NA | 90-100 ml/kg | ONCE ON | Day 28 |
| 2 | 5 | PAH^{enu2} | PBS | NA | (set volume) | Day 0 by | |
| 3 | 5 | MUT | ceDNA412 | 0.5 | | Hydrodynamic | |
| 4 | 5 | | ceDNA1476 | 0.5 | | IV | |
| 5 | 5 | | ceDNA1479 | 0.5 | | | |
| 6 | 5 | | ceDNA1939 | 0.5 | | | |
| 7 | 5 | | ceDNA1940 | 0.5 | | | |
| 8 | 5 | | ceDNA1941 | 0.5 | | | |
| 9 | 5 | | ceDNA1942 | 0.5 | | | |
| 10 | 5 | | ceDNA1943 | 0.5 | | | |
| 11 | 5 | | ceDNA1944 | 0.5 | | | |

No. = Number; IV = intravenous; ROA = route of administration; WT = wild type; MUT = homozygous mutant; min = minute; hr = hour

[0685] Blood was collected at interim and terminal time points as follows in Tables 25A and 25B, respectively.

TABLE 25A
Blood Collection (Interim) Example 9 study

| | |
|---|---|
| Group | Whole Blood Sample Collection Times |
| Number | Saphenous Only |
| | (Orbital by permission of Vet Staff) |
| | Serum^{a} |
| 1-11 | FASTED |
| | Day −3, 4, 7, 14, & 21 |
| Volume/ | ~50 μL whole blood |
| Portion | |
| Processing | One (1) aliquot |
| | (Pure Honey) |
| Storage | Frozen at nominally −70° C. |

^{a}Whole blood was collected into serum separator tubes, with clot activator

TABLE 25B
Terminal Blood and Tissue Collection

| | |
|---|---|
| Group | Sample Collection Times |
| Number | Terminal Whole Blood |
| | (cardiac) |
| | Serum^{a} |
| 1-11 | FASTED |
| | Day 28 |
| Portion | MOV |
| Processing/ | One (1) aliquot processed plasma |
| Storage | frozen at nominally −70° C. |

^{a}Whole blood was be collected into serum separator tubes, with clot activator,
MOV = maximum obtainable volume

### Study Details

[0686] Species (number, sex, age): 55+4 spare PAH^{enu2} Mutant (MUT) mice (mixed gender, ˜6-8 weeks old, age-matched at arrival); 5 Wild Type (WT); mixed gender, littermates; age-matched. Animals were ˜7-9 weeks of at dose initiation.
[0687] Cage Side Observations: Cage side observations were performed daily.
[0688] Clinical Observations: Clinical observations were performed ˜1, ˜5-6 and ˜24 hours post the Day 0 Test Material dose, as applicable for remaining groups.
[0689] Class of Compound: Recombinant DNA vector, ceDNA.
[0690] Body Weights: Body weights for all animals were recorded on Days −4, 0, 1, 2, 3, 7, 14, 21 & 28 (prior to euthanasia).
[0691] Dose Formulation: Test articles were supplied in a concentration stock. Stock was warmed to room temperature and diluted with the provided PBS immediately prior to use. Prepared materials may be stored at ˜4° C. if dosing was not performed immediately.
[0692] Dose Administration: Test Materials for Groups 1-12 were dosed on Day 0 by hydrodynamic IV administration, at a set volume per animal, 90-100 ml/kg (dependent on the lightest animal in the group) via lateral tail vein.
[0693] Fasting Prior to Blood Collection: All animals (all groups) were fasted for a minimum of 4 hours prior to all interim and terminal blood collections: Days −4, 3, 7, 14, 21 & 28.

[0694] Food was removed and bedding changed. Food was returned at the conclusion of each interim blood collections for a fast of no more than 8 hours in duration.
[0695] Interim Blood Collection: All animals in Groups 1-11 had interim blood collected on Days −4, 3, 7, 14 & 21. Animals had whole blood for fasted serum collection. After collection animals would receive 0.5-1.0 mL lactated Ringer's, subcutaneously
[0696] Blood Collection: Whole blood for serum was collected by saphenous vein. Whole blood was collected into a serum separator with clot activator tube and processed into one (1) aliquot of serum per facility SOPs. All samples were stored at nominally −70° C. until shipped to on dry ice.
[0697] Unscheduled Euthanasia: Terminal tissues were collected from moribund animals that were euthanized prior to their scheduled time point. If possible, tissues were collected and stored from animals that were found dead.
[0698] Euthanasia: On Day 28, after a minimum 4 hours fast, animals were euthanized by CO₂ asphyxiation followed by thoracotomy and exsanguination.
[0699] Terminal Blood: Whole blood from exsanguination was collected into a serum separator with clot activator tube and processed into two (2) aliquot of serum per facility SOPs. All samples were stored at nominally −70° C. until shipped to on dry ice.
[0700] Phenylalanine (PHE) Levels: Serum samples were analyzed by the Pure Honey for PHE levels.
[0701] Activity Levels: Two (2) frozen liver samples were analyzed by Pure Honey for Activity levels.

### Results

[0702] The present study tested two codon optimized human PAH sequences (codon optimized human PAH version 2 and codon optimized human PAH cDNA (with or without CpG minimization) in combination with different promoters or combinations of cis-regulatory elements. The specific elements contained in each tested ceDNA construct are summarized in Table 23.

[0703] As shown in FIGS. 15A-15I, at a 0.5 μg dose, all ceDNA vectors tested in this study, namely ceDNA1476, ceDNA1939, and ceDNA1941, but not the rest, showed acute correction of PHE levels (PHE μM) to below target concentration (less than 350 μM) in at least one out of total 5 mice within 7 days. Of note, ceDNA1476 and ceDNA1939 each had 4 out of total 5 mice that exhibited acute correction of PHE levels below the target concentration. ceDNA1479, ceDNA1940, and ceDNA1942 each had a single timepoint associated with a single mouse that that was at the 350 μM threshold, but not below; while ceDNA1479, ceDNA1942, ceDNA1943, and ceDNA1944 had no timepoints that were close to the 350 μM threshold.

[0704] The only structural difference between ceDNA1476 and ceDNA1479 is that the latter contains 5 copies of HNF1 binding sites (with 10-mer spacers between every two copies of HNF1) while ceDNA1476 contains only 6 copies of the combination of HNF1 and HNF4, where HNF1 and HNF4 alternate one another. The inventors found that the combination of HNF1 and HNF4 resulted in improved PHE level correction (compare FIG. 15C with FIG. 15B).

[0705] The difference between ceDNA1943, ceDNA1944 and ceDNA1939, ceDNA1940, ceDNA1941, and ceDNA1942 are the open reading frames of ceDNA1943 and ceDNA1944 have not been subject to CpG minimization. The improved PHE level corrections in ceDNA1939, ceDNA1940, ceDNA1941, and ceDNA1942 (FIGS. 15D-15G) as compared to ceDNA1943 and ceDNA1944 (FIGS. 15H and 15I) illustrate the importance of CpG minimization towards PAH expression and consequently, PHE level correction.

[0706] Similar to the observation noted in Example 8 with ceDNA1471, here in Example 9 it was noted that ceDNA1476, which has the promoter combination 3×HNF1-4∥Pro-Albumin Enh∥TTR promoter lowers PHE concentration below target values at a 0.5 μg dose, showing greater potency than the control ceDNA412 (1× VD_PromoterSet∥hPAH_codop_ORF_v2) in this study.

### Example 10: Pharmacology Study to Evaluate Biochemical Correction of Phenylalanine Levels in PAHe^{nu2} Mice by Hydrodynamic Administration of ceDNA-Effect of Different Promoters or Promoter Sets and PAH from Mouse or Human on PHE Correction

[0707] ceDNA Constructs

[0708] This study tested ceDNA vectors having different promoters or promoter sets (i.e., hAAT promoter and VD promoter set) and codon optimized PAH sequences or ORFs from mouse or human (i.e., mousePAH_codop_ORF_v2 or hPAH_codop_ORF_v2). ceDNA vectors were prepared and purified as described above in Examples 1 and 5.

[0709] The nucleic acid sequence of ceDNA containing codon optimized human PAH version 2 (ceDNA “hPAH Codop2”) is shown herein as SEQ ID NO: 192, and includes the following elements: left-ITR_v1: spacer_left-ITR_v2.1: VD_Promoter Set: PmeI_site: Modified_Minimum_Consensus_Kozak: hPAH_codop_ORF_v2: PacI_site: WPRE_3pUTR: bGH/spacer: spacer_right-ITR_v1: right-ITR_v1 (ceDNA412). ceDNA412 served as a control in this study described in Example 10.

[0710] The nucleic acid sequence of ceDNA containing codon optimized human PAH CpG minimized cDNA version 1 ORF (hPAH-cDNA_0CpG1_ORF) is shown herein as SEQ ID NO: 562 and includes the VD_Promoter Set (ceDNA1939). ceDNA1939, which was previously studied in in Example 9, also served as a control in this study described in Example 10.

[0711] The nucleic acid sequence of ceDNA containing codon optimized mouse PAH version 2 ORF (mousePAH_codop_ORF_v2) is shown herein as SEQ ID NO: 568 and includes the VD_Promoter Set (ceDNA1955).

[0712] The nucleic acid sequence of ceDNA containing codon optimized human PAH version 2 ORF (hPAH_codop_ORF_v2) is shown herein as SEQ ID NO: 569 and includes the human AAT promoter with the enhancers that are present in ceDNA1476 and ceDNA1479 (ceDNA62).

[0713] The features of the ceDNA vectors used in this study and as described above are summarized below in Table 26.

TABLE 26
Construct features of ceDNA vectors in Example 10 study

| ceDNA | Construct features |
|---|---|
| ceDNA412 | VD_PromoterSet ∥ hPAH_codop_ORF_v2 |
| ceDNA1939 | VD_PromoterSet ∥ hPAH-cDNA_0CpG1_ORF |
| ceDNA1955 | VD_PromoterSet ∥ mousePAH_codop_ORF_v2 |
| ceDNA62 | hAAT ∥ mousePAH_codop_ORF_v2 |

### Study Design

[0714] Each of the ceDNA PAH vectors (alone, without any LNP encapsulation) and the control were administered to mixed gender, age-matched PAHenu2 mice approximately 7-9 weeks old. The naked ceDNA vectors were dosed at 0.5 μg per animal (5 animals per group) by hydrodynamic intravenous injection via lateral tail vein in a dose volume of 90-100 ml/kg on day 0. Day 28 was the terminal time point. The study design is as shown below in Table 27.

TABLE 27
Test material administration in Example 10 study

| | | | | Dose | | Dosing | |
|---|---|---|---|---|---|---|---|
| Group | No. of | | | Levels | | Regimen | Terminal |
| No. | Animals | Genotype | Test Material | (μg) | Dose Volume | ROA | Time Point |
| 1 | 5 | WT | PBS | NA | 90-100 ml/kg | ONCE ON | Day 28 |
| 2 | 5 | PAH^{enu2} | PBS | NA | (set volume) | Day 0 by | |
| 3 | 5 | MUT | ceDNA412 | 0.5 | | Hydrodynamic | |
| 4 | 5 | | ceDNA1939 | 0.5 | | IV | |
| 5 | 5 | | ceDNA1955 | 0.5 | | | |
| 6 | 5 | | ceDNA62 | 0.5 | | | |

No. = Number; IV = intravenous; ROA = route of administration; WT = wild type; MUT = homozygous mutant; min = minute; hr = hour

[0715] Blood was collected at interim and terminal time points as follows in Tables 28A and 28B, respectively.

TABLE 28A
Blood Collection (Interim) Example 10 study

| | |
|---|---|
| Group | Whole Blood Sample Collection Times |
| Number | Saphenous Only |
| | (Orbital by permission of Vet Staff) |
| | Serum^{a} |
| 1-6 | FASTED |
| | Day −1, 3, 7, 14, & 21 |
| Volume/ | ~50 μL whole blood |
| Portion | |
| Processing | One (1) aliquot |
| | (Pure Honey) |
| Storage | Frozen at nominally −70° C. |

^{a}Whole blood was collected into serum separator tubes, with clot activator

TABLE 28B
Terminal Blood and Tissue Collection

| | |
|---|---|
| Group | Sample Collection Times |
| Number | Terminal Whole Blood |
| | (cardiac) |
| | Serum^{a} |
| 1-6 | FASTED |
| | Day 28 |
| Portion | MOV |
| Processing/ | One (1) aliquot processed plasma |
| Storage | frozen at nominally −70° C. |

^{a}Whole blood was be collected into serum separator tubes, with clot activator,
MOV = maximum obtainable volume

### Study Details

[0716] Species (number, sex, age): 30+3 spare PAH^{enu2} Mutant (MUT) mice (mixed gender, ˜6-8 weeks old, age-matched at arrival); 5 Wild Type (WT); mixed gender, littermates; age-matched. Animals were ˜7-9 weeks of at dose initiation.
[0717] Cage Side Observations: Cage side observations were performed daily.
[0718] Clinical Observations: Clinical observations were performed ˜1, ˜5-6 and ˜24 hours post the Day 0 Test Material dose, as applicable for remaining groups.
[0719] Class of Compound: Recombinant DNA vector, ceDNA.
[0720] Body Weights: Body weights for all animals were recorded on Days −1, 0, 1, 2, 3, 7, 14, 21 & 28 (prior to euthanasia).
[0721] Dose Formulation: Test articles were supplied in a concentration stock. Stock was warmed to room temperature and diluted with the provided PBS immediately prior to use. Prepared materials may be stored at ˜4° C. if dosing is not performed immediately.
[0722] Dose Administration: Test Materials for Groups 1-5 were dosed on Day 0 by hydrodynamic IV administration, at a set volume per animal, 90-100 ml/kg (dependent on the lightest animal in the group) via lateral tail vein.
[0723] Fasting Prior to Blood Collection: All animals (all groups) were fasted for a minimum of 4 hours prior to all interim and terminal blood collections: Days −4, 3, 7, 14, 21 & 28.
[0724] Food was removed and bedding changed. Food was returned at the conclusion of each interim blood collections for a fast of no more than 8 hours in duration.
[0725] Interim Blood Collection: All animals in Groups 1-6 had interim blood collected on Days −1, 3, 7, 14 & 21. Animals had whole blood for fasted serum collection. After collection animals would receive 0.5-1.0 mL lactated Ringer's, subcutaneously
[0726] Blood Collection: Whole blood for serum was collected by saphenous vein. Whole blood was collected into a serum separator with clot activator tube and processed into one (1) aliquot of serum per facility SOPs. All samples were be stored at nominally −70° C. until shipped to on dry ice.
[0727] Unscheduled Euthanasia: Terminal tissues were collected from moribund animals that are euthanized prior to their scheduled time point. If possible, tissues will be collected and stored from animals that are found dead.
[0728] Euthanasia: On Day 28, after a minimum 4 hours fast, animals were euthanized by CO₂ asphyxiation followed by thoracotomy and exsanguination.
[0729] Terminal Blood: Whole blood from exsanguination was collected into a serum separator with clot activator tube and processed into two (2) aliquot of serum per facility SOPs. All samples were stored at nominally −70° C. until shipped to on dry ice.
[0730] Phenylalanine (PHE) Levels: Serum samples were analyzed by the Pure Honey for PHE levels.
[0731] Activity Levels: Two (2) frozen liver samples were analyzed by Pure Honey for Activity levels.

### Results

[0732] The present study tested two codon optimized PAH sequences (i.e., mouse or human codon optimized PAH version 2 in combination with different promoters (i.e., VD promoter set or human AAT promoter. The specific elements contained in each tested ceDNA construct are summarized in Table 26.

[0733] As shown in FIGS. 16A-16D, at a 0.5 μg dose, and as demonstrated in at least Example 9, ceDNA412 and ceDNA1939, both expressing the codon-optimized human PAH ORF version 2, showed acute correction of PHE levels (PHE μM) to below target concentration (less than 350 μM) in at least one out of total 5 mice within 7 days. As it was so observed in Example 9, ceDNA1939 again exhibited acute PHE correction in 4 out of total 5 mice within 7 days.

[0734] Surprisingly, ceDNA1955 and ceDNA62 that both expressed the codon-optimized mouse PAH ORF version 2, did not result in PHE correction in the mice that was superior to ceDNA412 and ceDNA1939. ceDNA1955, at best, can be said to result in PHE correction that was equivalent or slightly inferior to ceDNA1939 correction. ceDNA62 did not show any PHE correction altogether. ceDNA62 has the hAAT promoter but no enhancers like ceDNA1476 and ceDNA1479 have (studied in Example 8) and without CpG minimization like ceDNA1528 has (studied in Example 7). The lack of PHE correction in ceDNA62 illustrates the importance of enhancers and CpG minimization in improving the hAAT promoter.

### Example 11: Pharmacology Study to Evaluate Biochemical Correction of Phenylalanine Levels in PAHe^{nu2} Mice by Hydrodynamic Administration of ceDNA-Effect of Different Promoters and their Cis-Regulatory Elements, Introns, and UTRs on PHE Correction

[0735] ceDNA Constructs

[0736] This study tested ceDNA vectors having different promoter sets (i.e., hAAT promoter sets and TTR promoter sets) and their respective cis-regulatory elements, post-transcriptional regulatory elements, introns and UTRs and codon optimized human PAH sequences or ORFs (i.e., hPAH-r5-s29, hPAH-r5-s29::hIVS1B_33bpFlanks, or hPAH-r5-s29::mod-Intron_oIVS-v2_33bpFlanks). ceDNA vectors were prepared and purified as described above in Examples 1 and 5.

[0737] The nucleic acid sequence of ceDNA containing codon optimized human PAH version 2 (ceDNA “hPAH Codop2”) is shown herein as SEQ ID NO: 192, and includes the following elements: left-ITR_v1: spacer_left-ITR_v2.1: VD_Promoter Set (VD): PmeI_site: Modified_Minimum_Consensus_Kozak: hPAH_codop_ORF_v2: PacI_site: WPRE_3pUTR: bGH/spacer: spacer_right-ITR_v1: right-ITR_v1 (ceDNA412). ceDNA412 served as a control in this study described in Example 11.

[0738] The nucleic acid sequence of ceDNA containing codon optimized human PAH version 2 r5-s29 with an intron and an intron flanking region (hPAH-r5-s29::oIVS1B_33bpFlanks) is shown herein as SEQ ID NO: 570 and includes the TTR promoter and other enhancers (i.e. PromoterSet-1471), introns, UTRs, restriction endonuclease site, cis- and post-transcriptional regulatory elements (ceDNA2409).

[0739] The nucleic acid sequence of ceDNA containing codon optimized human PAH version 2 r5-s29 with an intron and an intron flanking region (hPAH-r5-s29::mod-Intron_oIVS-v2_33bpFlanks) is shown herein as SEQ ID NO: 571 and includes the TTR promoter and the same enhancers (i.e., PromoterSet-1471), introns, UTRs, restriction endonuclease site, cis- and post-transcriptional regulatory elements as in ceDNA2409 (ceDNA2410).

[0740] The nucleic acid sequence of ceDNA containing codon optimized human PAH version 2 r5-s29 with an intron and an intron flanking region (hPAH-r5-s29::oIVS1B_33bpFlanks) is shown herein as SEQ ID NO: 572 and includes the hAAT promoter and other enhancers (i.e., PromoterSet-1476), introns, UTRs, restriction endonuclease site, cis- and post-transcriptional regulatory elements (ceDNA2415).

[0741] The nucleic acid sequence of ceDNA containing codon optimized human PAH version 2 r5-s29 with an intron and an intron flanking region (hPAH-r5-s29::oIVS1B_33bpFlanks) is shown herein as SEQ ID NO: 573 and includes the hAAT promoter and other enhancers (i.e., PromoterSet-1479), introns, UTRs, restriction endonuclease site, cis- and post-transcriptional regulatory elements (ceDNA2418). ceDNA2418 differs from ceDNA2415 in terms of the number of copies and types of HNF binding sites.

[0742] The nucleic acid sequence of ceDNA containing codon optimized human PAH version 2 r5-s29 with an intron and an intron flanking region (hPAH-r5-s29::mod-Intron_oIVS-v2_33bpFlanks) is shown herein as SEQ ID NO: 574 and includes the hAAT promoter and the same enhancers (i.e., PromoterSet-1476), introns, UTRs, restriction endonuclease site, cis- and post-transcriptional regulatory elements as in ceDNA2415 (ceDNA2416).

[0743] The nucleic acid sequence of ceDNA containing codon optimized human PAH version 2 r5-s29 with an intron and an intron flanking region (hPAH-r5-s29::mod-Intron_oIVS-v2_33bpFlanks) is shown herein as SEQ ID NO: 575 and includes the hAAT promoter and the same enhancers (PromoterSet-1479, introns, UTRs, restriction endonuclease site, cis- and post-transcriptional regulatory elements as in ceDNA2418 (ceDNA2419). ceDNA2419 differs from ceDNA2416 in terms of the number of copies and types of HNF binding sites.

[0744] The nucleic acid sequence of ceDNA containing codon optimized human PAH version 2 r5-s29 without an intron and an intron flanking region (hPAH-r5-s29) is shown herein as SEQ ID NO: 576 and includes the TTR promoter and the same enhancers (i.e., PromoterSet-1471), introns, UTRs, restriction endonuclease site, cis- and post-transcriptional regulatory elements as in ceDNA2409 (ceDNA2420).

[0745] The features of the ceDNA vectors used in this study and as described above are summarized below in Table 29.

TABLE 29
Construct features of ceDNA vectors in Example 11 study

| ceDNA | Construct features |
|---|---|
| ceDNA412 | 1× VD_PromoterSet ∥ hPAH_codop_ORF_v2 |
| ceDNA2409 | PromoterSet-1471 ∥ TTR-MVM_v2-PmeI-Mod2-5pUTR ∥ |
| | hPAH-r5-s29::hIVS1B_33bpFlanks ∥ WPRE_3pUTR |
| ceDNA2410 | PromoterSet-1471 ∥ TTR-MVM_v2-PmeI-Mod2-5pUTR ∥ |
| | hPAH-r5-s29::mod-Intron_oIVS-v2_33bpFlanks ∥ WPRE_3pUTR |
| ceDNA2415 | PromoterSet-1476 ∥ hAAT-PmeI-Mod2-5pUTR ∥ hPAH-r5- |
| | s29::hIVS1B_33bpFlanks ∥ WPRE_3pUTR |
| ceDNA2418 | PromoterSet-1479 ∥ hAAT-PmeI-Mod2-5pUTR ∥ hPAH-r5- |
| | s29::hIVS1B_33bpFlanks ∥ WPRE_3pUTR |
| ceDNA2416 | PromoterSet-1476 ∥ hAAT-PmeI-Mod2-5pUTR ∥ hPAH-r5-s29:: |
| | mod-Intron_oIVS-v2_33bpFlanks ∥ WPRE_3pUTR |
| ceDNA2419 | PromoterSet-1479 ∥ hAAT-PmeI-Mod2-5pUTR ∥ hPAH-r5-s29:: |
| | mod-Intron_oIVS-v2_33bpFlanks ∥ WPRE_3pUTR |
| ceDNA2420 | PromoterSet-1471 ∥ TTR-MVM_v2-PmeI-Mod2-5pUTR ∥ |
| | hPAH-r5-s29 ∥ WPRE_3pUTR |

### Study Design

[0746] Each of the ceDNA PAH vectors (alone, without any LNP encapsulation) and the control were administered to mixed gender, age-matched PAHenu2 mice approximately 6-11 weeks old. The naked ceDNA vectors were dosed at 0.1 μg (only selected ones) or 0.5 μg per animal (5 animals per group) by hydrodynamic intravenous injection via lateral tail vein in a dose volume of 90-100 ml/kg on day 0. Day 28 was the terminal time point. The study design is as shown below in Table 30.

TABLE 30
Test material administration in Example 11 study

| | | | | Dose | | Dosing | |
|---|---|---|---|---|---|---|---|
| Group | No. of | | | Levels | | Regimen | Terminal |
| No. | Animals | Genotype | Test Material | (μg) | Dose Volume | ROA | Time Point |
| 1 | 5 | WT | PBS | NA | 90-100 ml/kg | ONCE ON | Day 28 |
| 2 | 5 | PAH^{enu2} | PBS | NA | (set volume) | Day 0 by | |
| 3 | 5 | MUT | ceDNA412 | 0.5 | | Hydrodynamic | |
| 4 | 5 | | ceDNA412 | 0.1 | | IV | |
| 5 | 5 | | ceDNA2409 | 0.5 | | | |
| 6 | 5 | | ceDNA2410 | 0.5 | | | |
| 7 | 5 | | ceDNA2410 | 0.1 | | | |
| 8 | 5 | | ceDNA2415 | 0.5 | | | |
| 9 | 5 | | ceDNA2415 | 0.1 | | | |
| 10 | 5 | | ceDNA2418 | 0.5 | | | |
| 11 | 5 | | ceDNA2418 | 0.1 | | | |
| 12 | 5 | | ceDNA2416 | 0.5 | | | |
| 13 | 5 | | ceDNA2419 | 0.5 | | | |
| 14 | 5 | | ceDNA2420 | 0.5 | | | |

No. = Number; IV = intravenous; ROA = route of administration; WT = wild type; MUT = homozygous mutant; min = minute; hr = hour

[0747] Blood was collected at interim and terminal time points as follows in Tables 31A and 31B, respectively.

TABLE 31A
Blood Collection (Interim) Example 11 study

| | |
|---|---|
| Group | Whole Blood Sample Collection Times |
| Number | Saphenous Only |
| | (Orbital by permission of Vet Staff) |
| | Serum^{a} |
| 1-14 | FASTED |
| | Day −6, 3, 7, 14, & 21 |
| Volume/ | ~50 μL whole blood |
| Portion | |
| Processing | One (1) aliquot |
| | (Pure Honey) |
| Storage | Frozen at nominally −70° C. |

^{a}Whole blood was collected into serum separator tubes, with clot activator

TABLE 31B
Terminal Blood and Tissue Collection

| | |
|---|---|
| Group | Sample Collection Times |
| | Terminal Whole Blood |
| | (cardiac) |
| Number | Serum^{a} |
| 1-14 | FASTED |
| | Day 28 |
| Portion | MOV |
| Processing/ | One (1) aliquot processed plasma |
| Storage | frozen at nominally −70° C. |

^{a}Whole blood was be collected into serum separator tubes, with clot activator,
MOV = maximum obtainable volume

### Study Details

[0748] Species (number, sex, age): 70+3 spare PAH^{enu2} Mutant (MUT) mice (mixed gender, ˜6-8 weeks old, age-matched at arrival); 5 Wild Type (WT); mixed gender, littermates; age-matched. Animals were ˜6-11 weeks of at dose initiation.
[0749] Cage Side Observations: Cage side observations were performed daily.
[0750] Clinical Observations: Clinical observations were performed ˜1, ˜5-6 and ˜24 hours post the Day 0 Test Material dose, as applicable for remaining groups.
[0751] Class of Compound: Recombinant DNA vector, ceDNA.
[0752] Body Weights: Body weights for all animals were recorded on Days −6, 0, 1, 2, 3, 7, 14, 21 & 28 (prior to euthanasia).
[0753] Dose Formulation: Test articles were supplied in a concentration stock. Stock was warmed to room temperature and diluted with the provided PBS immediately prior to use. Prepared materials may be stored at ˜4° C. if dosing is not performed immediately.
[0754] Dose Administration: Test Materials for Groups 1-14 were dosed on Day 0 by hydrodynamic IV administration, at a set volume per animal, 90-100 ml/kg (dependent on the lightest animal in the group) via lateral tail vein.
[0755] Fasting Prior to Blood Collection: All animals (all groups) were fasted for a minimum of 4 hours prior to all interim and terminal blood collections: Days −6, 3, 7, 14, 21 & 28.
[0756] Food was removed and bedding changed. Food was returned at the conclusion of each interim blood collections for a fast of no more than 8 hours in duration.
[0757] Interim Blood Collection: All animals in Groups 1-10 had interim blood collected on Days −6, 3, 7, 14 & 21. Animals had whole blood for fasted serum collection. After collection animals would receive 0.5-1.0 mL lactated Ringer's, subcutaneously
[0758] Blood Collection: Whole blood for serum was collected by saphenous vein. Whole blood was collected into a serum separator with clot activator tube and processed into one (1) aliquot of serum per facility SOPs. All samples were be stored at nominally −70° C. until shipped to on dry ice.
[0759] Unscheduled Euthanasia: Terminal tissues were collected from moribund animals that are euthanized prior to their scheduled time point. If possible, tissues will be collected and stored from animals that are found dead.
[0760] Euthanasia: On Day 28, after a minimum 4 hours fast, animals were euthanized by CO₂ asphyxiation followed by thoracotomy and exsanguination.
[0761] Terminal Blood: Whole blood from exsanguination was collected into a serum separator with clot activator tube and processed into two (2) aliquot of serum per facility SOPs. All samples were stored at nominally −70° C. until shipped to on dry ice.
[0762] Phenylalanine (PHE) Levels: Serum samples were analyzed by the Pure Honey for PHE levels.
[0763] Activity Levels: Two (2) frozen liver samples were analyzed by Pure Honey for Activity levels.

### Results

[0764] The present study tested two codon optimized PAH sequences (i.e., mouse or human codon optimized PAH version 2 in combination with different promoters (i.e., VD promoter set or human AAT promoter. The specific elements contained in each tested ceDNA construct are summarized in Table 26.

[0765] FIGS. 17A-17I show the results from the study. As shown in FIG. 17A, at a 0.5 μg dose, ceDNA412 showed acute correction of PHE levels (PHE μM) to below target concentration (less than 350 μM) in all 5 out of total 5 mice within 7 days. Notably, in one of the mice, the PHE correction was sustained through Day 28. Comparatively, in Examples 8 and 9, PHE corrections were observed in 4 out of total 5 mice for ceDNA412.

[0766] ceDNA2409, ceDNA2410, ceDNA2415, ceDNA2418, ceDNA2416, and ceDNA2420 each showed acute correction of PHE levels (PHE μM) to below target concentration (less than 350 μM) in at least 1 out of total 5 mice within 7 days. Of note, ceDNA2409, ceDNA2410, and ceDNA2415 each showed acute correction of PHE levels (PHE μM) to below target concentration (less than 350 μM) in 4 out of total 5 mice within 7 days, and in at least 1 out of total 5 mice within 3 days. Significantly, in one of the mice administered with ceDNA2415, the PHE correction was sustained until through Day 28. In other words, this study shows that at least ceDNA2415, which expresses the hPAH-r5-s29::mod-Intron_oIVS-v2_33bpFlanks ORF, the TTR promoter along with enhancers, introns, UTRs, restriction endonuclease site, cis- and post-transcriptional regulatory elements, is equivalent if not superior to ceDNA412 that possesses the VD promoter set and the codon optimized human PAH version 2 ORF. When the study was repeated at a lower dose of 0.1 μg as shown in FIGS. 18A-18E, remarkably ceDNA2415 showed acute correction of PHE levels (PHE μM) to below target concentration (less than 350 μM) in 2 out of total 5 mice within 14 days, and in 1 out of total 5 mice within 7 days.

[0767] When the number and types of HNF binding sites were varied, but all other structural elements including the promoter itself were kept the same, as in ceDNA2418 (5×HNF1) vis-à-vis ceDNA2415 (3×HNF1-4) and ceDNA2419 (5×HNF1) vis-à-vis ceDNA2416 (3×HNF1-4), the PHE level corrections appeared to be compromised. Similar observation was noted when the mice were dosed at 0.1 μg of ceDNA2418 (FIG. 18D) vis-à-vis 0.1 μg ceDNA2415 (FIG. 18C). These observations in Example 11 are consistent with the observation noted in Example 8 for ceDNA1476 and ceDNA1479.

[0768] Compared to ceDNA2409, ceDNA2410, ceDNA2415, and ceDNA2416, ceDNA2420 PHE correction levels were inferior with 3 mice not achieving the target level at any time point. Compared to ceDNA2409, ceDNA2410, ceDNA2415, and ceDNA2416, ceDNA2420 expresses the hPAH-r5-s29 ORF but without any intron and intron flanking region. This observation highlights the importance of introns and intron flanking regions in improving the hPAH-r5-s29 ORF.

### Example 12: Pharmacology Study to Evaluate Biochemical Correction of Phenylalanine Levels in PAHe^{nu2} Mice by Hydrodynamic Administration of ceDNA-Effect of Different Promoters and ceDNA Production Methods on PHE Correction

[0769] ceDNA Constructs

[0770] This study tested ceDNA vectors having different promoter sets and their respective cis-regulatory elements, post-transcriptional regulatory elements, introns and UTRs and codon optimized human PAH sequences or ORFs. With the exception of ceDNA412 which served as the control, ceDNA vectors in this study were prepared and purified as described above in International Patent Application No. PCT/US2019/14122.

[0771] The nucleic acid sequence of ceDNA containing codon optimized human PAH version 2 (ceDNA “hPAH Codop2”) is shown herein as SEQ ID NO: 192, and includes the following elements: left-ITR_v1: spacer_left-ITR_v2.1: VD_Promoter Set (VD): PmeI_site: Modified_Minimum_Consensus_Kozak: hPAH_codop_ORF_v2: PacI_site: WPRE_3pUTR: bGH/spacer: spacer_right-ITR_v1: right-ITR_v1 (ceDNA412). ceDNA412 served as a control in this study described in Example 12.

[0772] The nucleic acid sequence of ceDNA containing codon optimized human PAH version 2 (hPAH_codop_ORF_v2) is shown herein as SEQ ID NO: 577 and includes the VD promoter set, introns, UTRs, restriction endonuclease sites, cis- and post-transcriptional regulatory elements (ceDNA34).

[0773] The nucleic acid sequence of ceDNA containing codon optimized human PAH version 2 r5-s29 with an intron and an intron flanking region (hPAH-r5-s29::mod-Intron_oIVS-v2_33bpFlanks) is shown herein as SEQ ID NO: 581 and includes the hAAT promoter and other enhancers (i.e., PromoterSet-1476), introns, UTRs, restriction endonuclease site, cis- and post-transcriptional regulatory elements (ceDNA41).

[0774] The nucleic acid sequence of ceDNA containing codon optimized human PAH version 2 (hPAH_codop_ORF_v2) is shown herein as SEQ ID NO: 579 and includes the TTR promoter and other enhancers (i.e., HS-CRM8_FOXA_HNF4_consensus_v1), introns, UTRs, restriction endonuclease site, cis- and post-transcriptional regulatory elements (ceDNA36).

[0775] The nucleic acid sequence of ceDNA containing codon optimized human PAH version 2 r5-s29 with an intron and an intron flanking region (hPAH-r5-s29::oIVS1B_33bpFlanks) is shown herein as SEQ ID NO: 583 and includes the TTR promoter and other enhancers (i.e., HS-CRM8_FOXA_HNF4_consensus_v1), introns, UTRs, restriction endonuclease site, cis- and post-transcriptional regulatory elements (ceDNA43).

[0776] The nucleic acid sequence of ceDNA containing codon optimized human PAH version 2 r5-s29 with an intron and an intron flanking region (hPAH-r5-s29::oIVS1B_33bpFlanks) is shown herein as SEQ ID NO: 582 and includes the TTR promoter and other enhancers (i.e., 3×_HNF_FOXA_v1), introns, UTRs, restriction endonuclease site, cis- and post-transcriptional regulatory elements (ceDNA42).

[0777] The features of the ceDNA vectors used in this study and as described above are summarized below in Table 32.

TABLE 32
Construct features of ceDNA vectors in Example 12 study

| ceDNA | Construct features |
|---|---|
| ceDNA412 | 1× VD_PromoterSet ∥ hPAH_codop_ORF_v2 |
| ceDNA34 | 1× VD_PromoterSet ∥ PmeI-Mod2 ∥ |
| | hPAH_codop_ORF_v2 ∥ WPRE_3pUTR |
| ceDNA41 | PromoterSet-1476 ∥ hAAT-PmeI-Mod2-5pUTR ∥ hPAH-r5- |
| | s29::hIVS1B_33bpFlanks ∥ WPRE_3pUTR |
| ceDNA36 | HS-CRM_FOXA_HNF4_consensus_v1 ∥ |
| | TTRe-TTRm-MVM_v2-Mod2 ∥ |
| | hPAH_codop_ORF_v2 ∥ WPRE_3pUTR |
| ceDNA43 | HS-CRM_FOXA_HNF4_consensus_v1 ∥ |
| | TTRe-TTRm-MVM_v2-Mod2 ∥ hPAH-r5-s29:: |
| | hIVS1B_33bpFlanks ∥ WPRE_3pUTR |
| ceDNA42 | 3×_HNF4_FOXA_v1 ∥ TTRe-TTRm-MVM_v2-Mod2 ∥ |
| | hPAH-r5-s29::hIVS1B_33bpFlanks ∥ WPRE_3pUTR |

### Study Design

[0778] Each of the ceDNA PAH vectors (alone, without any LNP encapsulation) and the control were administered to mixed gender, age-matched PAHenu2 mice approximately 7-10 weeks old. The naked ceDNA vectors were dosed at 0.1 μg (only selected ones) or 0.5 μg per animal (5 animals per group) by hydrodynamic intravenous injection via lateral tail vein in a dose volume of 90-100 ml/kg on day 0. Day 28 was the terminal time point. The study design is as shown below in Table 33.

TABLE 33
Test material administration in Example 12 study

| | | | | Dose | | Dosing | |
|---|---|---|---|---|---|---|---|
| Group | No. of | | | Levels | | Regimen | Terminal |
| No. | Animals | Genotype | Test Material | (μg) | Dose Volume | ROA | Time Point |
| 1 | 5 | WT | PBS | NA | 90-100 ml/kg | ONCE ON | Day 28 |
| 2 | 5 | PAH^{enu2} | PBS | NA | (set volume) | Day 0 by | |
| 3 | 5 | MUT | ceDNA412 | 0.5 | | Hydrodynamic | |
| 4 | 5 | | ceDNA34 | 0.5 | | IV | |
| 5 | 5 | | ceDNA34 | 0.1 | | | |
| 6 | 5 | | ceDNA41 | 0.5 | | | |
| 7 | 5 | | ceDNA36 | 0.5 | | | |
| 8 | 5 | | ceDNA36 | 0.1 | | | |
| 9 | 5 | | ceDNA43 | 0.5 | | | |
| 10 | 5 | | ceDNA43 | 0.1 | | | |
| 11 | 5 | | ceDNA42 | 0.5 | | | |
| 12 | 5 | | ceDNA42 | 0.1 | | | |

No. = Number; IV = intravenous; ROA = route of administration; WT = wild type; MUT = homozygous mutant; min = minute; hr = hour

[0779] Blood was collected at interim and terminal time points as follows in Tables 34A and 34B, respectively.

TABLE 34A
Blood Collection (Interim) Example 12 study

| | |
|---|---|
| Group | Whole Blood Sample Collection Times |
| Number | Saphenous Only |
| | (Orbital by permission of Vet Staff) |
| | Serum^{a} |
| 1-12 | FASTED |
| | Day −4, 3, 7, 14, 21 & 28 |
| Volume/ | ~50 μL whole blood |
| Portion | |
| Processing | One (1) aliquot |
| | (Pure Honey) |
| Storage | Frozen at nominally −70° C. |

^{a}Whole blood was collected into serum separator tubes, with clot activator

TABLE 34B
Terminal Blood and Tissue Collection

| | |
|---|---|
| Group | Sample Collection Times |
| | Terminal Whole Blood |
| | (cardiac) |
| Number | Serum^{a} |
| 1-12 | FASTED |
| | Day 28 |
| Portion | MOV |
| Processing/ | One (1) aliquot processed plasma |
| Storage | frozen at nominally −70° C. |

^{a}Whole blood was be collected into serum separator tubes, with clot activator,
MOV = maximum obtainable volume

### Study Details

[0780] Species (number, sex, age): 60+5 spare PAH^{enu2} Mutant (MUT) mice (mixed gender, ˜6-8 weeks old, age-matched at arrival); 5 Wild Type (WT); mixed gender, littermates; age-matched. Animals were ˜7-10 weeks of at dose initiation.
[0781] Cage Side Observations: Cage side observations were performed daily.
[0782] Clinical Observations: Clinical observations were performed ˜1, ˜5-6 and ˜24 hours post the Day 0 Test Material dose, as applicable for remaining groups.
[0783] Class of Compound: Recombinant DNA vector, ceDNA.
[0784] Body Weights: Body weights for all animals were recorded on Days −4, 0, 1, 2, 3, 7, 14, 21 & 28 (prior to euthanasia).
[0785] Dose Formulation: Test articles were supplied in a concentration stock. Stock was warmed to room temperature and diluted with the provided PBS immediately prior to use. Prepared materials may be stored at ˜4° C. if dosing is not performed immediately.
[0786] Dose Administration: Test Materials for Groups 1-12 were dosed on Day 0 by hydrodynamic IV administration, at a set volume per animal, 90-100 ml/kg (dependent on the lightest animal in the group) via lateral tail vein.
[0787] Fasting Prior to Blood Collection: All animals (all groups) were fasted for a minimum of 4 hours prior to all interim and terminal blood collections: Days −4, 0, 1, 2, 3, 7, 14, 21 & 28.

[0788] Food was removed and bedding changed. Food was returned at the conclusion of each interim blood collections for a fast of no more than 8 hours in duration.
[0789] Interim Blood Collection: All animals in Groups 1-12 had interim blood collected on Days −4, 3, 7, 14 & 21. Animals had whole blood for fasted serum collection. After collection animals would receive 0.5-1.0 mL lactated Ringer's, subcutaneously
[0790] Blood Collection: Whole blood for serum was collected by saphenous vein. Whole blood was collected into a serum separator with clot activator tube and processed into one (1) aliquot of serum per facility SOPs. All samples were be stored at nominally −70° C. until shipped to on dry ice.
[0791] Unscheduled Euthanasia: Terminal tissues were collected from moribund animals that are euthanized prior to their scheduled time point. If possible, tissues will be collected and stored from animals that are found dead.
[0792] Euthanasia: On Day 28, after a minimum 4 hours fast, animals were euthanized by CO₂ asphyxiation followed by thoracotomy and exsanguination.
[0793] Terminal Blood: Whole blood from exsanguination was collected into a serum separator with clot activator tube and processed into two (2) aliquot of serum per facility SOPs. All samples were stored at nominally −70° C. until shipped to on dry ice.
[0794] Phenylalanine (PHE) Levels: Serum samples were analyzed by the Pure Honey for PHE levels.
[0795] Activity Levels: Two (2) frozen liver samples were analyzed by Pure Honey for Activity levels.

### Results

[0796] The present study tested two codon optimized PAH sequences (i.e., hPAH_codop_ORF_v2 and hPAH-r5-s29::hIVS1B_33bpFlanks) in combination with different promoters or promoter sets having at least promoters accompanied by enhancers (i.e., VD promoter set, PromoterSet-1476, and TTR promoter with either HS-CRM_FOXA_HNF4_consensus_v1 or 3×_HNF4_FOXA_v1 as one of the enhancers). The specific elements contained in each tested ceDNA construct are summarized in Table 32.

[0797] As shown in FIG. 19A and FIG. 19B, at a 0.5 μg dose, ceDNA412 and its corresponding synthetically produced counterpart vector, ceDNA34, showed equivalent PAH activity and PHE correction. At 0.5 μg dosing, other synthetically produced vectors, namely ceDNA36, ceDNA41, and ceDNA43 exhibited acute correction of PHE levels (PHE μM) to below target concentration (less than 350 μM) in at least 1 out of total 5 mice within 3 days. Notably, ceDNA41 and ceDNA43 outperformed control ceDNA412 in that up to 4 out of total 5 mice achieved PHE levels that are below the target concentration within 3 days of dosing.

[0798] ceDNA36 and ceDNA43 each had the TTR promoter in combination with the HS-CRM_FOXA_HNF4_consensus_v1 enhancer, but differ in the PAH sequences in that ceDNA43 contained the hPAH-r5-s29::hIVS1B_33bpFlanks PAH sequence which has a CpG content=0 while ceDNA41 contained the hPAH_codop_ORF_v2 PAH sequence (CpG content=77). The superior PHE correction in ceDNA43, as compared to ceDNA36, illustrates the importance of CpG minimization in the PAH sequence (see FIGS. 19C and 19E). Similarly, apart from different production methods, ceDNA41 and ceDNA412 also differ in the PAH sequences in that ceDNA41 contained the hPAH-r5-s29::hIVS1B_33bpFlanks PAH sequence whereas ceDNA412 contained the hPAH_codop_ORF_v2 PAH sequence. ceDNA41 exhibited superior PHE correction, in comparison to ceDNA412 (see FIGS. 19D and 19A).

[0799] Both of the vectors containing the TTR promoter in combination with HS-CRM_FOXA_HNF4_consensus_v1 as an enhancer, i.e., ceDNA43 and ceDNA36, showed PHE correction in at least 1 of total 5 mice within 3 days of dosing, with ceDNA43 achieving PHE correction in 4 of total 5 mice (see FIGS. 19B and 19E). Surprisingly, ceDNA42 which differs from ceDNA43 in that the 3×_HNF4_FOXA_v1 used in combination with the same TTR promoter contains 3 copies of HNF4 binding sites, did not achieve PHE correction in any mice (see FIG. 19D).

[0800] As can be seen from the 0.5 μg dosing studies, ceDNA43 that was synthetically produced, expressed the hPAH-r5-s29::hIVS1B_33bpFlanks PAH sequence which has a CpG content=0, and contained the TTR promoter in combination with HS-CRM_FOXA_HNF4_consensus_v1 as an enhancer, was the most potent vector among all the vectors studied.

[0801] Thus, the studies in Examples 6-12 have shown that a ceDNA construct (e.g., a ceDNA vector) comprising a PAH nucleic acid sequence that has been codon optimized can be thoughtfully combined with particular cis-acting elements (e.g., specific promoters, specific enhancers and specific promoter and enhancer combinations), that have been tested for optimal correction of phenylalanine level (e.g., expression and duration). Moreover, the Example 12 study demonstrates that a synthetically produced ceDNA construct having equivalent or more potent PHE corrections in PAH-deficient PAH^{enu2} mice.

### Nucleic Acid Sequences:

[0802] The nucleic acid sequence of ceDNA containing codon optimized human PAH version 2 (ceDNA “hPAH Codop2”) is shown below (ceDNA412). The promoter is shown underlined (SEQ ID NO:191) and the codon optimized PAH version 2 open reading frame (ORF) is shown double underlined (SEQ ID NO:382).

(SEQ ID NO: 192)
AAAGTAGCCGAAGATGACGGTTTGTCACATGGAGTTGGCA
GGATGTTTGATTAAAAACATAACAGGAAGAAAAATGCCCC
GCTGTGGGCGGACAAAATAGTTGGGAACTGGGAGGGGTGG
AAATGGAGTTTTTAAGGATTATTTAGGGAAGAGTGACAAA
ATAGATGGGAACTGGGTGTAGCGTCGTAAGCTAATACGAA
AATTAAAAATGACAAAATAGTTTGGAACTAGATTTCACTT
ATCTGGTTCGGATCTCCTAGGCCTGCAGGCAGCTGCGCGC
TCGCTCGCTCACTGAGGCCGCCCGGGCAAAGCCCGGGCGT
CGGGCGACCTTTGGTCGCCCGGCCTCAGTGAGCGAGCGAG
CGCGCAGAGAGGGAGTGGCCAACTCCATCACTAGGGGTTC
CTTGTAGTTAATGATTAACCCGCCATGCTACTTATCGCGG
CCGCCGGGGGAGGCTGCTGGTGAATATTAACCAAGGTCAC
CCCAGTTATCGGAGGAGCAAACAGGGGCTAAGTCCACACG
CGTGGTACCGTCTGTCTGCACATTTCGTAGAGCGAGTGTT
CCGATACTCTAATCTCCCTAGGCAAGGTTCATATTTGTGT
AGGTTACTTATTCTCCTTTTGTTGACTAAGTCAATAATCA
GAATCAGCAGGTTTGGAGTCAGCTTGGCAGGGATCAGCAG
CCTGGGTTGGAAGGAGGGGGTATAAAAGCCCCTTCACCAG
GAGAAGCCGTCACACAGATCCACAAGCTCCTGAAGAGGTA
AGGGTTTAAGGGATGGTTGGTTGGTGGGGTATTAATGTTT
AATTACCTGGAGCACCTGCCTGAAATCACTTTTTTTCAGG
TTGGTTTAAACCGCAGCCACCATGAGCACCGCCGTGCTGG
AAAATCCTGGCCTGGGCAGAAAGCTGAGCGACTTCGGCCA
AGAGACAAGCTACATCGAGGACAACTGCAACCAGAACGGC
GCCATCAGCCTGATCTTCAGCCTGAAAGAAGAAGTGGGCG
CCCTGGCCAAGGTGCTGAGACTGTTCGAAGAGAACGACGT
GAACCTGACACACATCGAGAGCAGACCCAGCAGACTGAAG
AAGGACGAGTACGAGTTCTTCACCCACCTGGACAAGCGGA
GCCTGCCTGCTCTGACCAACATCATCAAGATCCTGCGGCA
CGACATCGGCGCCACAGTGCACGAACTGAGCCGGGACAAG
AAAAAGGACACCGTGCCATGGTTCCCCAGAACCATCCAAG
AGCTGGACAGATTCGCCAACCAGATCCTGAGCTATGGCGC
CGAGCTGGACGCTGATCACCCTGGCTTTAAGGACCCCGTG
TACCGGGCCAGAAGAAAGCAGTTTGCCGATATCGCCTACA
ACTACCGGCACGGCCAGCCTATTCCTCGGGTCGAGTACAT
GGAAGAGGAAAAGAAAACCTGGGGCACCGTGTTCAAGACC
CTGAAGTCCCTGTACAAGACCCACGCCTGCTACGAGTACA
ACCACATCTTCCCACTGCTCGAAAAGTACTGCGGCTTCCA
CGAGGACAATATCCCTCAGCTTGAGGACGTGTCCCAGTTC
CTGCAGACCTGCACCGGCTTTAGACTGAGGCCAGTTGCCG
GACTGCTGAGCAGCAGAGATTTTCTCGGCGGCCTGGCCTT
CAGAGTGTTCCACTGTACCCAGTACATCAGACACGGCAGC
AAGCCCATGTACACCCCTGAGCCTGATATCTGCCACGAGC
TGCTGGGACATGTGCCCCTGTTCAGCGATAGAAGCTTCGC
CCAGTTCAGCCAAGAGATCGGACTGGCTTCTCTGGGAGCC
CCTGACGAGTACATTGAGAAGCTGGCCACCATCTACTGGT
TCACCGTGGAATTCGGCCTGTGCAAGCAGGGCGACAGCAT
CAAAGCTTATGGCGCTGGCCTGCTGTCTAGCTTCGGCGAG
CTGCAGTACTGTCTGAGCGAGAAGCCTAAGCTGCTGCCCC
TGGAACTGGAAAAGACCGCCATCCAGAACTACACCGTGAC
CGAGTTCCAGCCTCTGTACTACGTGGCCGAGAGCTTCAAC
GACGCCAAAGAAAAAGTGCGGAACTTCGCCGCCACCATTC
CTCGGCCTTTCAGCGTCAGATACGACCCCTACACACAGCG
GATCGAGGTGCTGGACAACACACAGCAGCTGAAAATTCTG
GCCGACTCCATCAACAGCGAGATCGGCATCCTGTGCAGCG
CCCTGCAGAAAATCAAGTGATAGTTAATTAAGAGCATCTT
ACCGCCATTTATTCCCATATTTGTTCTGTTTTTCTTGATT
TGGGTATACATTTAAATGTTAATAAAACAAAATGGTGGGG
CAATCATTTACATTTTTAGGGATATGTAATTACTAGTTCA
GGTGTATTGCCACAAGACAAACATGTTAAGAAACTTTCCC
GTTATTTACGCTCTGTTCCTGTTAATCAACCTCTGGATTA
CAAAATTTGTGAAAGATTGACTGATATTCTTAACTATGTT
GCTCCTTTTACGCTGTGTGGATATGCTGCTTTATAGCCTC
TGTATCTAGCTATTGCTTCCCGTACGGCTTTCGTTTTCTC
CTCCTTGTATAAATCCTGGTTGCTGTCTCTTTTAGAGGAG
TTGTGGCCCGTTGTCCGTCAACGTGGCGTGGTGTGCTCTG
TGTTTGCTGACGCAACCCCCACTGGCTGGGGCATTGCCAC
CACCTGTCAACTCCTTTCTGGGACTTTCGCTTTCCCCCTC
CCGATCGCCACGGCAGAACTCATCGCCGCCTGCCTTGCCC
GCTGCTGGACAGGGGCTAGGTTGCTGGGCACTGATAATTC
CGTGGTGTTGTCTGTGCCTTCTAGTTGCCAGCCATCTGTT
GTTTGCCCCTCCCCCGTGCCTTCCTTGACCCTGGAAGGTG
CCACTCCCACTGTCCTTTCCTAATAAAATGAGGAAATTGC
ATCGCATTGTCTGAGTAGGTGTCATTCTATTCTGGGGGGG
GGGTGGGGCAGGACAGCAAGGGGGAGGATTGGGAAGACAA
TAGCAGGCATGCTGGGGATGCGGTGGGCTCTATGGCTCTA
GAGCATGGCTACGTAGATAAGTAGCATGGCGGGTTAATCA
TTAACTACACCTGCAGGAGGAACCCCTAGTGATGGAGTTG
GCCACTCCCTCTCTGCGCGCTCGCTCGCTCACTGAGGCCG
GGCGACCAAAGGTCGCCCGACGCCCGGGCGGCCTCAGTGA
GCGAGCGAGCGCGCAGCTGCCTGCAGGGGCGCGCCTCGAG
CCATGGTGCTAGCAGCTGATGCATAGCATGCGGTACCGGG
AGATGGGGGAGGCTAACTGAAACACGGAAGGAGACAATAC
CGGAAGGAACCCGCGCTATGACGGCAATAAAAAGACAGAA
TAAAACGCACGGGTGTTGGGTCGTTTGTTCATAAACGCGG
GGTTCGGTCCCAGGGCTGGCACTCTGTCGATACCCCACCG
AGACCCCATTGGGACCAATACGCCCGCGTTTCTTCCTTTT
CCCCACCCCAACCCCCAAGTTCGGGTGAAGGCCCAGGGCT
CGCAGCCAACGTCGGGGCGGCAAGCCCTGCCATAGCCACT
ACGGGTACGTAGGCCAACCACTAGAACTATAGCTAGAGTC
CTGGGCGAACAAACGATGCTCGCCTTCCAGAAAACCGAGG
ATGCGAACCACTTCATCCGGGGTCAGCACCACCGGCAAGC
GCCGCGACGGCCGAGGTCTACCGATCTCCTGAAGCCAGGG
CAGATCCGTGCACAGCACCTTGCCGTAGAAGAACAGCAAG
GCCGCCAATGCCTGACGATGCGTGGAGACCGAAACCTTGC
GCTCGTTCGCCAGCCAGGACAGAAATGCCTCGACTTCGCT
GCTGCCCAAGGTTGCCGGGTGACGCACACCGTGGAAACGG
ATGAAGGCACGAACCCAGTTGACATAAGCCTGTTCGGTTC
GTAAACTGTAATGCAAGTAGCGTATGCGCTCACGCAACTG
GTCCAGAACCTTGACCGAACGCAGCGGTGGTAACGGCGCA
GTGGCGGTTTTCATGGCTTGTTATGACTGTTTTTTTGTAC
AGTCTATGCCTCGGGCATCCAAGCAGCAAGCGCGTTACGC
CGTGGGTCGATGTTTGATGTTATGGAGCAGCAACGATGTT
ACGCAGCAGCAACGATGTTACGCAGCAGGGCAGTCGCCCT
AAAACAAAGTTAGGTGGCTCAAGTATGGGCATCATTCGCA
CATGTAGGCTCGGCCCTGACCAAGTCAAATCCATGCGGGC
TGCTCTTGATCTTTTCGGTCGTGAGTTCGGAGACGTAGCC
ACCTACTCCCAACATCAGCCGGACTCCGATTACCTCGGGA
ACTTGCTCCGTAGTAAGACATTCATCGCGCTTGCTGCCTT
CGACCAAGAAGCGGTTGTTGGCGCTCTCGCGGCTTACGTT
CTGCCCAGGTTTGAGCAGCCGCGTAGTGAGATCTATATCT
ATGATCTCGCAGTCTCCGGCGAGCACCGGAGGCAGGGCAT
TGCCACCGCGCTCATCAATCTCCTCAAGCATGAGGCCAAC
GCGCTTGGTGCTTATGTGATCTACGTGCAAGCAGATTACG
GTGACGATCCCGCAGTGGCTCTCTATACAAAGTTGGGCAT
ACGGGAAGAAGTGATGCACTTTGATATCGACCCAAGTACC
GCCACCTAACAATTCGTTCAAGCCGAGATCGGCTTCCCGG
CCGCGGAGTTGTTCGGTAAATTGTCACAACGCCGCGAATA
TAGTCTTTACCATGCCCTTGGCCACGCCCCTCTTTAATAC
GACGGGCAATTTGCACTTCAGAAAATGAAGAGTTTGCTTT
AGCCATAACAAAAGTCCAGTATGCTTTTTCACAGCATAAC
TGGACTGATTTCAGTTTACAACTATTCTGTCTAGTTTAAG
ACTTTATTGTCATAGTTTAGATCTATTTTGTTCAGTTTAA
GACTTTATTGTCCGCCCACACCCGCTTACGCAGGGCATCC
ATTTATTACTCAACCGTAACCGATTTTGCCAGGTTACGCG
GCTGGTCTGCGGTGTGAAATACCGCACAGATGCGTAAGGA
GAAAATACCGCATCAGGCGCTCTTCCGCTTCCTCGCTCAC
TGACTCGCTGCGCTCGGTCGTTCGGCTGCGGCGAGCGGTA
TCAGCTCACTCAAAGGCGGTAATACGGTTATCCACAGAAT
CAGGGGATAACGCAGGAAAGAACATGTGAGCAAAAGGCCA
GCAAAAGGCCAGGAACCGTAAAAAGGCCGCGTTGCTGGCG
TTTTTCCATAGGCTCCGCCCCCCTGACGAGCATCACAAAA
ATCGACGCTCAAGTCAGAGGTGGCGAAACCCGACAGGACT
ATAAAGATACCAGGCGTTTCCCCCTGGAAGCTCCCTCGTG
CGCTCTCCTGTTCCGACCCTGCCGCTTACCGGATACCTGT
CCGCCTTTCTCCCTTCGGGAAGCGTGGCGCTTTCTCAATG
CTCACGCTGTAGGTATCTCAGTTCGGTGTAGGTCGTTCGC
TCCAAGCTGGGCTGTGTGCACGAACCCCCCGTTCAGCCCG
ACCGCTGCGCCTTATCCGGTAACTATCGTCTTGAGTCCAA
CCCGGTAAGACACGACTTATCGCCACTGGCAGCAGCCACT
GGTAACAGGATTAGCAGAGCGAGGTATGTAGGCGGTGCTA
CAGAGTTCTTGAAGTGGTGGCCTAACTACGGCTACACTAG
AAGGACAGTATTTGGTATCTGCGCTCTGCTGAAGCCAGTT
ACCTTCGGAAAAAGAGTTGGTAGCTCTTGATCCGGCAAAC
AAACCACCGCTGGTAGCGGTGGTTTTTTTGTTTGCAAGCA
GCAGATTACGCGCAGAAAAAAAGGATCTCAAGAAGATCCT
TTGATCTTTTCTACGGGGTCTGACGCTCAGTGGAACGAAA
ACTCACGTTAAGGGATTTTGGTCATGAGATTATCAAAAAG
GATCTTCACCTAGATCCTTTTAAATTAAAAATGAAGTTTT
AAATCAATCTAAAGTATATATGAGTAAACTTGGTCTGACA
GTTACCAATGCTTAATCAGTGAGGCACCTATCTCAGCGAT
CTGTCTATTTCGTTCATCCATAGTTGCCTGACTCCCCGTC
GTGTAGATAACTACGATACGGGAGGGCTTACCATCTGGCC
CCAGTGCTGCAATGATACCGCGAGACCCACGCTCACCGGC
TCCAGATTTATCAGCAATAAACCAGCCAGCCGGAAGGGCC
GAGCGCAGAAGTGGTCCTGCAACTTTATCCGCCTCCATCC
AGTCTATTAATTGTTGCCGGGAAGCTAGAGTAAGTAGTTC
GCCAGTTAATAGTTTGCGCAACGTTGTTGCCATTGCTACA
GGCATCGTGGTGTCACGCTCGTCGTTTGGTATGGCTTCAT
TCAGCTCCGGTTCCCAACGATCAAGGCGAGTTACATGATC
CCCCATGTTGTGCAAAAAAGCGGTTAGCTCCTTCGGTCCT
CCGATCGTTGTCAGAAGTAAGTTGGCCGCAGTGTTATCAC
TCATGGTTATGGCAGCACTGCATAATTCTCTTACTGTCAT
GCCATCCGTAAGATGCTTTTCTGTGACTGGTGAGTACTCA
ACCAAGTCATTCTGAGAATAGTGTATGCGGCGACCGAGTT
GCTCTTGCCCGGCGTCAATACGGGATAATACCGCGCCACA
TAGCAGAACTTTAAAAGTGCTCATCATTGGAAAACGTTCT
TCGGGGCGAAAACTCTCAAGGATCTTACCGCTGTTGAGAT
CCAGTTCGATGTAACCCACTCGTGCACCCAACTGATCTTC
AGCATCTTTTACTTTCACCAGCGTTTCTGGGTGAGCAAAA
ACAGGAAGGCAAAATGCCGCAAAAAAGGGAATAAGGGCGA
CACGGAAATGTTGAATACTCATACTCTTCCTTTTTCAATA
TTATTGAAGCATTTATCAGGGTTATTGTCTCATGAGCGGA
TACATATTTGAATGTATTTAGAAAAATAAACAAATAGGGG
TTCCGCGCACATTTCCCCGAAAAGTGCCACCTGAAATTGT
AAACGTTAATATTTTGTTAAAATTCGCGTTAAATTTTTGT
TAAATCAGCTCATTTTTTAACCAATAGGCCGAAATCGGCA
AAATCCCTTATAAATCAAAAGAATAGACCGAGATAGGGTT
GAGTGTTGTTCCAGTTTGGAACAAGAGTCCACTATTAAAG
AACGTGGACTCCAACGTCAAAGGGCGAAAAACCGTCTATC
AGGGCGATGGCCCACTACGTGAACCATCACCCTAATCAAG
TTTTTTGGGGTCGAGGTGCCGTAAAGCACTAAATCGGAAC
CCTAAAGGGAGCCCCCGATTTAGAGCTTGACGGGGAAAGC
CGGCGAACGTGGCGAGAAAGGAAGGGAAGAAAGCGAAAGG
AGCGGGCGCTAGGGCGCTGGCAAGTGTAGCGGTCACGCTG
CGCGTAACCACCACACCCGCCGCGCTTAATGCGCCGCTAC
AGGGCGCGTCCCATTCGCCATTCAGGCTGCAAATAAGCGT
TGATATTCAGTCAATTACAAACATTAATAACGAAGAGATG
ACAGAAAAATTTTCATTCTGTGACAGAGAA

[0803] The ceDNA construct above includes left-ITR_v1, spacer_left-ITR_v2.1, VD_PromoterSet, PmeI_site, Mod_Minimum_Consensus_Kozak, hPAH_codop_ORF_v2, PacI_site, WPRE_3pUTR, bGH, spacer_right-ITR_v1, right-ITR_v1

[0804] According to some embodiments, the nucleic acid sequence of ceDNA containing codon optimized human PAH version 2 (ceDNA “hPAH Codop2”) comprises SEQ ID NO: 192. According to some embodiments, the nucleic acid sequence of ceDNA containing codon optimized human PAH version 2 (ceDNA “hPAH Codop2”) is at least 85% identical to SEQ ID NO: 192. According to some embodiments, the nucleic acid sequence of ceDNA containing codon optimized human PAH version 2 (ceDNA “hPAH Codop2”) is at least 90% identical to SEQ ID NO: 192. According to some embodiments, the nucleic acid sequence of ceDNA containing codon optimized human PAH version 2 (ceDNA “hPAH Codop2”) is at least 91% identical to SEQ ID NO: 192. According to some embodiments, the nucleic acid sequence of ceDNA containing codon optimized human PAH version 2 (ceDNA “hPAH Codop2”) is at least 92% identical to SEQ ID NO: 192. According to some embodiments, the nucleic acid sequence of ceDNA containing codon optimized human PAH version 2 (ceDNA “hPAH Codop2”) is at least 93% identical to SEQ ID NO: 192. According to some embodiments, the nucleic acid sequence of ceDNA containing codon optimized human PAH version 2 (ceDNA “hPAH Codop2”) is at least 94% identical to SEQ ID NO: 192. According to some embodiments, the nucleic acid sequence of ceDNA containing codon optimized human PAH version 2 (ceDNA “hPAH Codop2”) is at least 95% identical to SEQ ID NO: 192. According to some embodiments, the nucleic acid sequence of ceDNA containing codon optimized human PAH version 2 (ceDNA “hPAH Codop2”) is at least 96% identical to SEQ ID NO: 192. According to some embodiments, the nucleic acid sequence of ceDNA containing codon optimized human PAH version 2 (ceDNA “hPAH Codop2”) is at least 97% identical to SEQ ID NO: 192. According to some embodiments, the nucleic acid sequence of ceDNA containing codon optimized human PAH version 2 (ceDNA “hPAH Codop2”) is at least 98% identical to SEQ ID NO: 192. According to some embodiments, the nucleic acid sequence of ceDNA containing codon optimized human PAH version 2 (ceDNA “hPAH Codop2”) is at least 99% identical to SEQ ID NO: 192. According to some embodiments, the nucleic acid sequence of ceDNA containing codon optimized human PAH version 2 (ceDNA “hPAH Codop2”) consists of SEQ ID NO: 192.

[0805] The nucleic acid sequence of ceDNA containing human PAH cDNA (ceDNA VD promoter linked to hPAH cDNA without codon optimization) is shown below. The promoter is shown underlined (SEQ ID NO:191) and the PAH open reading frame (ORF) is shown in double underline (SEQ ID NO:394; ceDNA802).

(SEQ ID NO: 193)
GGCCGGCCCCTGCAGGCAGCTGCGCGCTCGCTCGCTCACT
GAGGCCGCCCGGGCAAAGCCCGGGCGTCGGGCGACCTTTG
GTCGCCCGGCCTCAGTGAGCGAGCGAGCGCGCAGAGAGGG
AGTGGCCAACTCCATCACTAGGGGTTCCTTGTAGTTAATG
ATTAACCCGCCATGCTACTTATCTACGTAGCCATGCTCTA
GACGGGGGAGGCTGCTGGTGAATATTAACCAAGGTCACCC
CAGTTATCGGAGGAGCAAACAGGGGCTAAGTCCACACGCG
TGGTACCGTCTGTCTGCACATTTCGTAGAGCGAGTGTTCC
GATACTCTAATCTCCCTAGGCAAGGTTCATATTTGTGTAG
GTTACTTATTCTCCTTTTGTTGACTAAGTCAATAATCAGA
ATCAGCAGGTTTGGAGTCAGCTTGGCAGGGATCAGCAGCC
TGGGTTGGAAGGAGGGGGTATAAAAGCCCCTTCACCAGGA
GAAGCCGTCACACAGATCCACAAGCTCCTGAAGAGGTAAG
GGTTTAAGGGATGGTTGGTTGGTGGGGTATTAATGTTTAA
TTACCTGGAGCACCTGCCTGAAATCACTTTTTTTCAGGTT
GGTTTAAACGCCGCCACCATGTCCACTGCGGTCCTGGAAA
ACCCAGGCTTGGGCAGGAAACTCTCTGACTTTGGACAGGA
AACAAGCTATATTGAAGACAACTGCAATCAAAATGGTGCC
ATATCACTGATCTTCTCACTCAAAGAAGAAGTTGGTGCAT
TGGCCAAAGTATTGCGCTTATTTGAGGAGAATGATGTAAA
CCTGACCCACATTGAATCTAGACCTTCTCGTTTAAAGAAA
GATGAGTATGAATTTTTCACCCATTTGGATAAACGTAGCC
TGCCTGCTCTGACAAACATCATCAAGATCTTGAGGCATGA
CATTGGTGCCACTGTCCATGAGCTTTCACGAGATAAGAAG
AAAGACACAGTGCCCTGGTTCCCAAGAACCATTCAAGAGC
TGGACAGATTTGCCAATCAGATTCTCAGCTATGGAGCGGA
ACTGGATGCTGACCACCCTGGTTTTAAAGATCCTGTGTAC
CGTGCAAGACGGAAGCAGTTTGCTGACATTGCCTACAACT
ACCGCCATGGGCAGCCCATCCCTCGAGTGGAATACATGGA
GGAAGAAAAGAAAACATGGGGCACAGTGTTCAAGACTCTG
AAGTCCTTGTATAAAACCCATGCTTGCTATGAGTACAATC
ACATTTTTCCACTTCTTGAAAAGTACTGTGGCTTCCATGA
AGATAACATTCCCCAGCTGGAAGACGTTTCTCAGTTCCTG
CAGACTTGCACTGGTTTCCGCCTCCGACCTGTGGCTGGCC
TGCTTTCCTCTCGGGATTTCTTGGGTGGCCTGGCCTTCCG
AGTCTTCCACTGCACACAGTACATCAGACATGGATCCAAG
CCCATGTATACCCCCGAACCTGACATCTGCCATGAGCTGT
TGGGACATGTGCCCTTGTTTTCAGATCGCAGCTTTGCCCA
GTTTTCCCAGGAAATTGGCCTTGCCTCTCTGGGTGCACCT
GATGAATACATTGAAAAGCTCGCCACAATTTACTGGTTTA
CTGTGGAGTTTGGGCTCTGCAAACAAGGAGACTCCATAAA
GGCATATGGTGCTGGGCTCCTGTCATCCTTTGGTGAATTA
CAGTACTGCTTATCAGAGAAGCCAAAGCTTCTCCCCCTGG
AGCTGGAGAAGACAGCCATCCAAAATTACACTGTCACGGA
GTTCCAGCCCCTCTATTACGTGGCAGAGAGTTTTAATGAT
GCCAAGGAGAAAGTAAGGAACTTTGCTGCCACAATACCTC
GGCCCTTCTCAGTTCGCTACGACCCATACACCCAAAGGAT
TGAGGTCTTGGACAATACCCAGCAGCTTAAGATTTTGGCT
GATTCCATTAACAGTGAAATTGGAATCCTTTGCAGTGCCC
TCCAGAAAATAAAGTAATTAATTAAGAGCATCTTACCGCC
ATTTATTCCCATATTTGTTCTGTTTTTCTTGATTTGGGTA
TACATTTAAATGTTAATAAAACAAAATGGTGGGGCAATCA
TTTACATTTTTAGGGATATGTAATTACTAGTTCAGGTGTA
TTGCCACAAGACAAACATGTTAAGAAACTTTCCCGTTATT
TACGCTCTGTTCCTGTTAATCAACCTCTGGATTACAAAAT
TTGTGAAAGATTGACTGATATTCTTAACTATGTTGCTCCT
TTTACGCTGTGTGGATATGCTGCTTTATAGCCTCTGTATC
TAGCTATTGCTTCCCGTACGGCTTTCGTTTTCTCCTCCTT
GTATAAATCCTGGTTGCTGTCTCTTTTAGAGGAGTTGTGG
CCCGTTGTCCGTCAACGTGGCGTGGTGTGCTCTGTGTTTG
CTGACGCAACCCCCACTGGCTGGGGCATTGCCACCACCTG
TCAACTCCTTTCTGGGACTTTCGCTTTCCCCCTCCCGATC
GCCACGGCAGAACTCATCGCCGCCTGCCTTGCCCGCTGCT
GGACAGGGGCTAGGTTGCTGGGCACTGATAATTCCGTGGT
GTTGTCTGTGCCTTCTAGTTGCCAGCCATCTGTTGTTTGC
CCCTCCCCCGTGCCTTCCTTGACCCTGGAAGGTGCCACTC
CCACTGTCCTTTCCTAATAAAATGAGGAAATTGCATCGCA
TTGTCTGAGTAGGTGTCATTCTATTCTGGGGGGTGGGGTG
GGGCAGGACAGCAAGGGGGAGGATTGGGAAGACAATAGCA
GGCATGCTGGGGATGCGGTGGGCTCTATGGCTCTAGAGCA
TGGCTACGTAGATAAGTAGCATGGCGGGTTAATCATTAAC
TACACCTGCAGGAGGAACCCCTAGTGATGGAGTTGGCCAC
TCCCTCTCTGCGCGCTCGCTCGCTCACTGAGGCCGGGCGA
CCAAAGGTCGCCCGACGCCCGGGCGGCCTCAGTGAGCGAG
CGAGCGCGCAGCTGCCTGCAGGGGCGCGCCTCGAGGCATG
CGGTACCAAGCTTGTCGAGAAGTACTAGAGGATCATAATC
AGCCATACCACATTTGTAGAGGTTTTACTTGCTTTAAAAA
ACCTCCCACACCTCCCCCTGAACCTGAAACATAAAATGAA
TGCAATTGTTGTTGTTAACTTGTTTATTGCAGCTTATAAT
GGTTACAAATAAAGCAATAGCATCACAAATTTCACAAATA
AAGCATTTTTTTCACTGCATTCTAGTTGTGGTTTGTCCAA
ACTCATCAATGTATCTTATCATGTCTGGATCTGATCACTG
ATATCGCCTAGGAGATCCGAACCAGATAAGTGAAATCTAG
TTCCAAACTATTTTGTCATTTTTAATTTTCGTATTAGCTT
ACGACGCTACACCCAGTTCCCATCTATTTTGTCACTCTTC
CCTAAATAATCCTTAAAAACTCCATTTCCACCCCTCCCAG
TTCCCAACTATTTTGTCCGCCCACAGCGGGGCATTTTTCT
TCCTGTTATGTTTTTAATCAAACATCCTGCCAACTCCATG
TGACAAACCGTCATCTTCGGCTACTTTTTCTCTGTCACAG
AATGAAAATTTTTCTGTCATCTCTTCGTTATTAATGTTTG
TAATTGACTGAATATCAACGCTTATTTGCAGCCTGAATGG
CGAATGGGACGCGCCCTGTAGCGGCGCATTAAGCGCGGCG
GGTGTGGTGGTTACGCGCAGCGTGACCGCTACACTTGCCA
GCGCCCTAGCGCCCGCTCCTTTCGCTTTCTTCCCTTCCTT
TCTCGCCACGTTCGCCGGCTTTCCCCGTCAAGCTCTAAAT
CGGGGGCTCCCTTTAGGGTTCCGATTTAGTGCTTTACGGC
ACCTCGACCCCAAAAAACTTGATTAGGGTGATGGTTCACG
TAGTGGGCCATCGCCCTGATAGACGGTTTTTCGCCCTTTG
ACGTTGGAGTCCACGTTCTTTAATAGTGGACTCTTGTTCC
AAACTGGAACAACACTCAACCCTATCTCGGTCTATTCTTT
TGATTTATAAGGGATTTTGCCGATTTCGGCCTATTGGTTA
AAAAATGAGCTGATTTAACAAAAATTTAACGCGAATTTTA
ACAAAATATTAACGTTTACAATTTCAGGTGGCACTTTTCG
GGGAAATGTGCGCGGAACCCCTATTTGTTTATTTTTCTAA
ATACATTCAAATATGTATCCGCTCATGAGACAATAACCCT
GATAAATGCTTCAATAATATTGAAAAAGGAAGAGTATGAG
TATTCAACATTTCCGTGTCGCCCTTATTCCCTTTTTTGCG
GCATTTTGCCTTCCTGTTTTTGCTCACCCAGAAACGCTGG
TGAAAGTAAAAGATGCTGAAGATCAGTTGGGTGCACGAGT
GGGTTACATCGAACTGGATCTCAACAGCGGTAAGATCCTT
GAGAGTTTTCGCCCCGAAGAACGTTTTCCAATGATGAGCA
CTTTTAAAGTTCTGCTATGTGGCGCGGTATTATCCCGTAT
TGACGCCGGGCAAGAGCAACTCGGTCGCCGCATACACTAT
TCTCAGAATGACTTGGTTGAGTACTCACCAGTCACAGAAA
AGCATCTTACGGATGGCATGACAGTAAGAGAATTATGCAG
TGCTGCCATAACCATGAGTGATAACACTGCGGCCAACTTA
CTTCTGACAACGATCGGAGGACCGAAGGAGCTAACCGCTT
TTTTGCACAACATGGGGGATCATGTAACTCGCCTTGATCG
TTGGGAACCGGAGCTGAATGAAGCCATACCAAACGACGAG
CGTGACACCACGATGCCTGTAGCAATGGCAACAACGTTGC
GCAAACTATTAACTGGCGAACTACTTACTCTAGCTTCCCG
GCAACAATTAATAGACTGGATGGAGGCGGATAAAGTTGCA
GGACCACTTCTGCGCTCGGCCCTTCCGGCTGGCTGGTTTA
TTGCTGATAAATCTGGAGCCGGTGAGCGTGGGTCTCGCGG
TATCATTGCAGCACTGGGGCCAGATGGTAAGCCCTCCCGT
ATCGTAGTTATCTACACGACGGGGAGTCAGGCAACTATGG
ATGAACGAAATAGACAGATCGCTGAGATAGGTGCCTCACT
GATTAAGCATTGGTAACTGTCAGACCAAGTTTACTCATAT
ATACTTTAGATTGATTTAAAACTTCATTTTTAATTTAAAA
GGATCTAGGTGAAGATCCTTTTTGATAATCTCATGACCAA
AATCCCTTAACGTGAGTTTTCGTTCCACTGAGCGTCAGAC
CCCGTAGAAAAGATCAAAGGATCTTCTTGAGATCCTTTTT
TTCTGCGCGTAATCTGCTGCTTGCAAACAAAAAAACCACC
GCTACCAGCGGTGGTTTGTTTGCCGGATCAAGAGCTACCA
ACTCTTTTTCCGAAGGTAACTGGCTTCAGCAGAGCGCAGA
TACCAAATACTGTCCTTCTAGTGTAGCCGTAGTTAGGCCA
CCACTTCAAGAACTCTGTAGCACCGCCTACATACCTCGCT
CTGCTAATCCTGTTACCAGTGGCTGCTGCCAGTGGCGATA
AGTCGTGTCTTACCGGGTTGGACTCAAGACGATAGTTACC
GGATAAGGCGCAGCGGTCGGGCTGAACGGGGGGTTCGTGC
ACACAGCCCAGCTTGGAGCGAACGACCTACACCGAACTGA
GATACCTACAGCGTGAGCATTGAGAAAGCGCCACGCTTCC
CGAAGGGAGAAAGGCGGACAGGTATCCGGTAAGCGGCAGG
GTCGGAACAGGAGAGCGCACGAGGGAGCTTCCAGGGGGAA
ACGCCTGGTATCTTTATAGTCCTGTCGGGTTTCGCCACCT
CTGACTTGAGCGTCGATTTTTGTGATGCTCGTCAGGGGGG
CGGAGCCTATGGAAAAACGCCAGCAACGCGGCCTTTTTAC
GGTTCCTGGCCTTTTGCTGGCCTTTTGCTCACATGTTCTT
TCCTGCGTTATCCCCTGATTCTGTGGATAACCGTATTACC
GCCTTTGAGTGAGCTGATACCGCTCGCCGCAGCCGAACGA
CCGAGCGCAGCGAGTCAGTGAGCGAGGAAGCGGAAGAGCG
CCTGATGCGGTATTTTCTCCTTACGCATCTGTGCGGTATT
TCACACCGCAGACCAGCCGCGTAACCTGGCAAAATCGGTT
ACGGTTGAGTAATAAATGGATGCCCTGCGTAAGCGGGTGT
GGGCGGACAATAAAGTCTTAAACTGAACAAAATAGATCTA
AACTATGACAATAAAGTCTTAAACTAGACAGAATAGTTGT
AAACTGAAATCAGTCCAGTTATGCTGTGAAAAAGCATACT
GGACTTTTGTTATGGCTAAAGCAAACTCTTCATTTTCTGA
AGTGCAAATTGCCCGTCGTATTAAAGAGGGGCGTGGCCAA
GGGCATGGTAAAGACTATATTCGCGGCGTTGTGACAATTT
ACCGAACAACTCCGCGGCCGGGAAGCCGATCTCGGCTTGA
ACGAATTGTTAGGTGGCGGTACTTGGGTCGATATCAAAGT
GCATCACTTCTTCCCGTATGCCCAACTTTGTATAGAGAGC
CACTGCGGGATCGTCACCGTAATCTGCTTGCACGTAGATC
ACATAAGCACCAAGCGCGTTGGCCTCATGCTTGAGGAGAT
TGATGAGCGCGGTGGCAATGCCCTGCCTCCGGTGCTCGCC
GGAGACTGCGAGATCATAGATATAGATCTCACTACGCGGC
TGCTCAAACCTGGGCAGAACGTAAGCCGCGAGAGCGCCAA
CAACCGCTTCTTGGTCGAAGGCAGCAAGCGCGATGAATGT
CTTACTACGGAGCAAGTTCCCGAGGTAATCGGAGTCCGGC
TGATGTTGGGAGTAGGTGGCTACGTCTCCGAACTCACGAC
CGAAAAGATCAAGAGCAGCCCGCATGGATTTGACTTGGTC
AGGGCCGAGCCTACATGTGCGAATGATGCCCATACTTGAG
CCACCTAACTTTGTTTTAGGGCGACTGCCCTGCTGCGTAA
CATCGTTGCTGCTGCGTAACATCGTTGCTGCTCCATAACA
TCAAACATCGACCCACGGCGTAACGCGCTTGCTGCTTGGA
TGCCCGAGGCATAGACTGTACAAAAAAACAGTCATAACAA
GCCATGAAAACCGCCACTGCGCCGTTACCACCGCTGCGTT
CGGTCAAGGTTCTGGACCAGTTGCGTGAGCGCATACGCTA
CTTGCATTACAGTTTACGAACCGAACAGGCTTATGTCAAC
TGGGTTCGTGCCTTCATCCGTTTCCACGGTGTGCGTCACC
CGGCAACCTTGGGCAGCAGCGAAGTCGAGGCATTTCTGTC
CTGGCTGGCGAACGAGCGCAAGGTTTCGGTCTCCACGCAT
CGTCAGGCATTGGCGGCCTTGCTGTTCTTCTACGGCAAGG
TGCTGTGCACGGATCTGCCCTGGCTTCAGGAGATCGGAAG
ACCTCGGCCGTCGCGGCGCTTGCCGGTGGTGCTGACCCCG
GATGAAGTGGTTCGCATCCTCGGTTTTCTGGAAGGCGAGC
ATCGTTTGTTCGCCCAGGACTCTAGCTATAGTTCTAGTGG
TTGGCTACGTATACTCCGGAATATTAATAGATCATGGAGA
TAATTAAAATGATAACCATCTCGCAAATAAATAAGTATTT
TACTGTTTTCGTAACAGTTTTGTAATAAAAAAACCTATAA
ATATTCCGGATTATTCATACCGTCCCACCATCGGGCGCGG
ATCTCGGTCCGAAACCATGTCGTACTACCATCACCATCAC
CATCACGATTACGATATCCCAACGACCGAAAACCTGTATT
TTCAGGGCGCCATGGGATCC

[0806] SEQ ID NO: 193 includes the following elements. Left-ITR_v1: spacer_left-ITR_v1: VD_Promoter Set: PmeI_site: Consensus_Kozak: hPAH_cDNA_ORF_v3: PacI_site: WPRE_3pUTR: bGH: spacer_right-ITR_v1: right-ITR_v1.

[0807] According to some embodiments, the nucleic acid sequence of ceDNA containing human PAH cDNA (ceDNA VD promoter linked to hPAH cDNA without codon optimization) comprises SEQ ID NO: 193. According to some embodiments, the nucleic acid sequence of ceDNA containing human PAH cDNA (ceDNA VD promoter linked to hPAH cDNA without codon optimization) is at least 85% identical to SEQ ID NO: 193. According to some embodiments, the nucleic acid sequence of ceDNA containing human PAH cDNA (ceDNA VD promoter linked to hPAH cDNA without codon optimization) is at least 90% identical to SEQ ID NO: 193. According to some embodiments, the nucleic acid sequence of ceDNA containing human PAH cDNA (ceDNA VD promoter linked to hPAH cDNA without codon optimization) is at least 91% identical to SEQ ID NO: 193. According to some embodiments, the nucleic acid sequence of ceDNA containing human PAH cDNA (ceDNA VD promoter linked to hPAH cDNA without codon optimization) is at least 92% identical to SEQ ID NO: 193. According to some embodiments, the nucleic acid sequence of ceDNA containing human PAH cDNA (ceDNA VD promoter linked to hPAH cDNA without codon optimization) is at least 93% identical to SEQ ID NO: 193. According to some embodiments, the nucleic acid sequence of ceDNA containing human PAH cDNA (ceDNA VD promoter linked to hPAH cDNA without codon optimization) is at least 94% identical to SEQ ID NO: 193. According to some embodiments, the nucleic acid sequence of ceDNA containing human PAH cDNA (ceDNA VD promoter linked to hPAH cDNA without codon optimization) is at least 95% identical to SEQ ID NO: 193. According to some embodiments, the nucleic acid sequence of ceDNA containing human PAH cDNA (ceDNA VD promoter linked to hPAH cDNA without codon optimization) is at least 96% identical to SEQ ID NO: 193. According to some embodiments, the nucleic acid sequence of ceDNA containing human PAH cDNA (ceDNA VD promoter linked to hPAH cDNA without codon optimization) is at least 97% identical to SEQ ID NO: 193. According to some embodiments, the nucleic acid sequence of ceDNA containing human PAH cDNA (ceDNA VD promoter linked to hPAH cDNA without codon optimization) is at least 98% identical to SEQ ID NO: 193. According to some embodiments, the nucleic acid sequence of ceDNA containing human PAH cDNA (ceDNA VD promoter linked to hPAH cDNA without codon optimization) is at least 99% identical to SEQ ID NO: 193. According to some embodiments, the nucleic acid sequence of ceDNA containing human PAH cDNA (ceDNA VD promoter linked to hPAH cDNA without codon optimization) consists of SEQ ID NO: 193.

[0808] The nucleic acid sequence of ceDNA containing codon optimized human PAH version 2 (ceDNA “hPAH Codop2”) with specific cis-regulatory elements is shown below (ceDNA1132).

(SEQ ID NO: 194)
CCTGCAGGCAGCTGCGCGCTCGCTCGCTCACTGAGGCCGC
CCGGGCAAAGCCCGGGCGTCGGGCGACCTTTGGTCGCCCG
GCCTCAGTGAGCGAGCGAGCGCGCAGAGAGGGAGTGGCCA
ACTCCATCACTAGGGGTTCCTTGTAGTTAATGATTAACCC
GCCATGCTACTTATCGCGGCCGCGGGGGAGGCTGCTGGTG
AATATTAACCAAGGTCACCCCAGTTATCGGAGGAGCAAAC
AGGGGCTAAGTCCACCGGGGGAGGCTGCTGGTGAATATTA
ACCAAGGTCACCCCAGTTATCGGAGGAGCAAACAGGGGCT
AAGTCCACCGGGGGAGGCTGCTGGTGAATATTAACCAAGG
TCACCCCAGTTATCGGAGGAGCAAACAGGGGCTAAGTCCA
CGGTACCCACTGGGAGGATGTTGAGTAAGATGGAAAACTA
CTGATGACCCTTGCAGAGACAGAGTATTAGGACATGTTTG
AACAGGGGCCGGGCGATCAGCAGGTAGCTCTAGAGGATCC
CCGTCTGTCTGCACATTTCGTAGAGCGAGTGTTCCGATAC
TCTAATCTCCCTAGGCAAGGTTCATATTTGTGTAGGTTAC
TTATTCTCCTTTTGTTGACTAAGTCAATAATCAGAATCAG
CAGGTTTGGAGTCAGCTTGGCAGGGATCAGCAGCCTGGGT
TGGAAGGAGGGGGTATAAAAGCCCCTTCACCAGGAGAAGC
CGTCACACAGATCCACAAGCTCCTGAAGAGGTAAGGGTTT
AAGGGATGGTTGGTTGGTGGGGTATTAATGTTTAATTACC
TGGAGCACCTGCCTGAAATCACTTTTTTTCAGGTTGGGTT
TAAACCGCAGCCACCATGAGCACCGCCGTGCTGGAAAATC
CTGGCCTGGGCAGAAAGCTGAGCGACTTCGGCCAAGAGAC
AAGCTACATCGAGGACAACTGCAACCAGAACGGCGCCATC
AGCCTGATCTTCAGCCTGAAAGAAGAAGTGGGCGCCCTGG
CCAAGGTGCTGAGACTGTTCGAAGAGAACGACGTGAACCT
GACACACATCGAGAGCAGACCCAGCAGACTGAAGAAGGAC
GAGTACGAGTTCTTCACCCACCTGGACAAGCGGAGCCTGC
CTGCTCTGACCAACATCATCAAGATCCTGCGGCACGACAT
CGGCGCCACAGTGCACGAACTGAGCCGGGACAAGAAAAAG
GACACCGTGCCATGGTTCCCCAGAACCATCCAAGAGCTGG
ACAGATTCGCCAACCAGATCCTGAGCTATGGCGCCGAGCT
GGACGCTGATCACCCTGGCTTTAAGGACCCCGTGTACCGG
GCCAGAAGAAAGCAGTTTGCCGATATCGCCTACAACTACC
GGCACGGCCAGCCTATTCCTCGGGTCGAGTACATGGAAGA
GGAAAAGAAAACCTGGGGCACCGTGTTCAAGACCCTGAAG
TCCCTGTACAAGACCCACGCCTGCTACGAGTACAACCACA
TCTTCCCACTGCTCGAAAAGTACTGCGGCTTCCACGAGGA
CAATATCCCTCAGCTTGAGGACGTGTCCCAGTTCCTGCAG
ACCTGCACCGGCTTTAGACTGAGGCCAGTTGCCGGACTGC
TGAGCAGCAGAGATTTTCTCGGCGGCCTGGCCTTCAGAGT
GTTCCACTGTACCCAGTACATCAGACACGGCAGCAAGCCC
ATGTACACCCCTGAGCCTGATATCTGCCACGAGCTGCTGG
GACATGTGCCCCTGTTCAGCGATAGAAGCTTCGCCCAGTT
CAGCCAAGAGATCGGACTGGCTTCTCTGGGAGCCCCTGAC
GAGTACATTGAGAAGCTGGCCACCATCTACTGGTTCACCG
TGGAATTCGGCCTGTGCAAGCAGGGCGACAGCATCAAAGC
TTATGGCGCTGGCCTGCTGTCTAGCTTCGGCGAGCTGCAG
TACTGTCTGAGCGAGAAGCCTAAGCTGCTGCCCCTGGAAC
TGGAAAAGACCGCCATCCAGAACTACACCGTGACCGAGTT
CCAGCCTCTGTACTACGTGGCCGAGAGCTTCAACGACGCC
AAAGAAAAAGTGCGGAACTTCGCCGCCACCATTCCTCGGC
CTTTCAGCGTCAGATACGACCCCTACACACAGCGGATCGA
GGTGCTGGACAACACACAGCAGCTGAAAATTCTGGCCGAC
TCCATCAACAGCGAGATCGGCATCCTGTGCAGCGCCCTGC
AGAAAATCAAGTGATAGTTAATTAAGAGCATCTTACCGCC
ATTTATTCCCATATTTGTTCTGTTTTTCTTGATTTGGGTA
TACATTTAAATGTTAATAAAACAAAATGGTGGGGCAATCA
TTTACATTTTTAGGGATATGTAATTACTAGTTCAGGTGTA
TTGCCACAAGACAAACATGTTAAGAAACTTTCCCGTTATT
TACGCTCTGTTCCTGTTAATCAACCTCTGGATTACAAAAT
TTGTGAAAGATTGACTGATATTCTTAACTATGTTGCTCCT
TTTACGCTGTGTGGATATGCTGCTTTATAGCCTCTGTATC
TAGCTATTGCTTCCCGTACGGCTTTCGTTTTCTCCTCCTT
GTATAAATCCTGGTTGCTGTCTCTTTTAGAGGAGTTGTGG
CCCGTTGTCCGTCAACGTGGCGTGGTGTGCTCTGTGTTTG
CTGACGCAACCCCCACTGGCTGGGGCATTGCCACCACCTG
TCAACTCCTTTCTGGGACTTTCGCTTTCCCCCTCCCGATC
GCCACGGCAGAACTCATCGCCGCCTGCCTTGCCCGCTGCT
GGACAGGGGCTAGGTTGCTGGGCACTGATAATTCCGTGGT
GTTGTCTGTGCCTTCTAGTTGCCAGCCATCTGTTGTTTGC
CCCTCCCCCGTGCCTTCCTTGACCCTGGAAGGTGCCACTC
CCACTGTCCTTTCCTAATAAAATGAGGAAATTGCATCGCA
TTGTCTGAGTAGGTGTCATTCTATTCTGGGGGGTGGGGTG
GGGCAGGACAGCAAGGGGGAGGATTGGGAAGACAATAGCA
GGCATGCTGGGGATGCGGTGGGCTCTATGGCTCTAGAGCA
TGGCTACGTAGATAAGTAGCATGGCGGGTTAATCATTAAC
TACACCTGCAGGAGGAACCCCTAGTGATGGAGTTGGCCAC
TCCCTCTCTGCGCGCTCGCTCGCTCACTGAGGCCGGGCGA
CCAAAGGTCGCCCGACGCCCGGGCGGCCTCAGTGAGCGAG
CGAGCGCGCAGCTGCCTGCAGG

[0809] SEQ ID NO: 194 includes the following elements. Left-ITR_v1, spacer_left-ITR_v2.1, 3×SerpEnh-TTRe-TTRm, MVM_intron, PmeI_site, Mod_Minimum_Consensus_Kozak, hPAH_codop_ORF_v2, PacI_site, WPRE_3pUTR, bGH, spacer_right-ITR_v1, right-ITR_v1.

[0810] According to some embodiments, the nucleic acid sequence of ceDNA containing codon optimized human PAH version 2 (ceDNA “hPAH_codop_ORF_v2”) with specific cis-regulatory elements comprises SEQ ID NO: 194. According to some embodiments, the nucleic acid sequence of ceDNA containing codon optimized human PAH version 2 (ceDNA “hPAH_codop_ORF_v2”) with specific cis-regulatory elements is at least 85% identical to SEQ ID NO: 194. According to some embodiments, the nucleic acid sequence of ceDNA containing codon optimized human PAH version 2 (ceDNA “hPAH_codop_ORF_v2”) with specific cis-regulatory elements is at least 90% identical to SEQ ID NO: 194. According to some embodiments, the nucleic acid sequence of ceDNA containing codon optimized human PAH version 2 (ceDNA “hPAH_codop_ORF_v2”) with specific cis-regulatory elements is at least 91% identical to SEQ ID NO: 194. According to some embodiments, the nucleic acid sequence of ceDNA containing codon optimized human PAH version 2 (ceDNA “hPAH_codop_ORF_v2”) with specific cis-regulatory elements is at least 92% identical to SEQ ID NO: 194. According to some embodiments, the nucleic acid sequence of ceDNA containing codon optimized human PAH version 2 (ceDNA “hPAH_codop_ORF_v2”) with specific cis-regulatory elements is at least 93% identical to SEQ ID NO: 194. According to some embodiments, the nucleic acid sequence of ceDNA containing codon optimized human PAH version 2 (ceDNA “hPAH_codop_ORF_v2”) with specific cis-regulatory elements is at least 94% identical to SEQ ID NO: 194. According to some embodiments, the nucleic acid sequence of ceDNA containing codon optimized human PAH version 2 (ceDNA “hPAH_codop_ORF_v2”) with specific cis-regulatory elements is at least 95% identical to SEQ ID NO: 194. According to some embodiments, the nucleic acid sequence of ceDNA containing codon optimized human PAH version 2 (ceDNA “hPAH_codop_ORF_v2”) with specific cis-regulatory elements is at least 96% identical to SEQ ID NO: 194. According to some embodiments, the nucleic acid sequence of ceDNA containing codon optimized human PAH version 2 (ceDNA “hPAH_codop_ORF_v2”) with specific cis-regulatory elements is at least 97% identical to SEQ ID NO: 194. According to some embodiments, the nucleic acid sequence of ceDNA containing codon optimized human PAH version 2 (ceDNA “hPAH_codop_ORF_v2”) with specific cis-regulatory elements is at least 98% identical to SEQ ID NO: 194. According to some embodiments, the nucleic acid sequence of ceDNA containing codon optimized human PAH version 2 (ceDNA “hPAH_codop_ORF_v2”) with specific cis-regulatory elements is at least 99% identical to SEQ ID NO: 194. According to some embodiments, the nucleic acid sequence of ceDNA containing codon optimized human PAH version 2 (ceDNA “hPAH_codop_ORF_v2”) with specific cis-regulatory elements consists of SEQ ID NO: 194.

[0811] The nucleic acid sequence of ceDNA containing codon optimized human PAH version 2 (ceDNA “hPAH Codop2”) with a 29 amino acid deletion, with specific cis-regulatory elements is shown as SEQ ID NO: 195 (ceDNA1274).

[0812] SEQ ID NO: 195 includes the following elements. left-ITR_v1, spacer_left-ITR_v2.1, VD_PromoterSet, PmeI_site, Mod_Minimum_Consensus_Kozak, hPAH_codop_ORF_v2_delta1-29aa, PacI_site, WPRE_3pUTR, bGH, spacer_right-ITR_v1, right-ITR_v1.

[0813] According to some embodiments, the nucleic acid sequence of ceDNA containing codon optimized human PAH version 2 delta1-29aa (ceDNA “hPAH_codop_ORF_v2_delta1-29aa”) with specific cis-regulatory elements comprises SEQ ID NO: 195. According to some embodiments, the nucleic acid sequence of ceDNA containing codon optimized human PAH version 2 delta1-29aa (ceDNA “hPAH_codop_ORF_v2_delta1-29aa”) with specific cis-regulatory elements is at least 85% identical to SEQ ID NO: 195. According to some embodiments, the nucleic acid sequence of ceDNA containing codon optimized human PAH version 2 delta1-29aa (ceDNA “hPAH_codop_ORF_v2_delta1-29aa”) with specific cis-regulatory elements is at least 90% identical to SEQ ID NO: 195. According to some embodiments, the nucleic acid sequence of ceDNA containing codon optimized human PAH version 2 delta1-29aa (ceDNA “hPAH_codop_ORF_v2_delta1-29aa”) with specific cis-regulatory elements is at least 91% identical to SEQ ID NO: 195. According to some embodiments, the nucleic acid sequence of ceDNA containing codon optimized human PAH version 2 delta1-29aa (ceDNA “hPAH_codop_ORF_v2_delta1-29aa”) with specific cis-regulatory elements is at least 92% identical to SEQ ID NO: 195. According to some embodiments, the nucleic acid sequence of ceDNA containing codon optimized human PAH version 2 delta1-29aa (ceDNA “hPAH_codop_ORF_v2_delta1-29aa”) with specific cis-regulatory elements is at least 93% identical to SEQ ID NO: 195. According to some embodiments, the nucleic acid sequence of ceDNA containing codon optimized human PAH version 2 delta1-29aa (ceDNA “hPAH_codop_ORF_v2_delta1-29aa”) with specific cis-regulatory elements is at least 94% identical to SEQ ID NO: 195. According to some embodiments, the nucleic acid sequence of ceDNA containing codon optimized human PAH version 2 delta1-29aa (ceDNA “hPAH_codop_ORF_v2_delta1-29aa”) with specific cis-regulatory elements is at least 95% identical to SEQ ID NO: 195. According to some embodiments, the nucleic acid sequence of ceDNA containing codon optimized human PAH version 2 delta1-29aa (ceDNA “hPAH_codop_ORF_v2_delta1-29aa”) with specific cis-regulatory elements is at least 96% identical to SEQ ID NO: 195. According to some embodiments, the nucleic acid sequence of ceDNA containing codon optimized human PAH version 2 delta1-29aa (ceDNA “hPAH_codop_ORF_v2_delta1-29aa”) with specific cis-regulatory elements is at least 97% identical to SEQ ID NO: 195. According to some embodiments, the nucleic acid sequence of ceDNA containing codon optimized human PAH version 2 delta1-29aa (ceDNA “hPAH_codop_ORF_v2_delta1-29aa”) with specific cis-regulatory elements is at least 98% identical to SEQ ID NO: 195. According to some embodiments, the nucleic acid sequence of ceDNA containing codon optimized human PAH version 2 delta1-29aa (ceDNA “hPAH_codop_ORF_v2_delta1-29aa”) with specific cis-regulatory elements is at least 99% identical to SEQ ID NO: 195. According to some embodiments, the nucleic acid sequence of ceDNA containing codon optimized human PAH version 2 delta1-29aa (ceDNA “hPAH_codop_ORF_v2_delta1-29aa”) with specific cis-regulatory elements consists of SEQ ID NO: 195.

[0814] The nucleic acid sequence of ceDNA containing codon optimized human PAH version 2 r5-s29 (ceDNA “hPAH-r5-s29”), with specific cis-regulatory elements is shown as SEQ ID NO: 196 (ceDNA1414).

[0815] SEQ ID NO: 196 includes the following elements. left-ITR_v1, spacer_left-ITR_v2.1, 3×VanD_TTRe_PromoterSet, PmeI_site, Mod_Minimum_Consensus_Kozak, hPAH-r5-s29::hIVS1B, PacI_site, WPRE_3pUTR, bGH, spacer_right-ITR_v1, right-ITR_v1.

[0816] According to some embodiments, the nucleic acid sequence of ceDNA containing codon optimized human PAH version 2 r5-s29 (ceDNA “hPAH-r5-s29”) with specific cis-regulatory elements comprises SEQ ID NO: 196. According to some embodiments, the nucleic acid sequence of ceDNA containing codon optimized human PAH version 2 r5-s29 (ceDNA “hPAH-r5-s29”) with specific cis-regulatory elements is at least 85% identical to SEQ ID NO: 196. According to some embodiments, the nucleic acid sequence of ceDNA containing codon optimized human PAH version 2 r5-s29 (ceDNA “hPAH-r5-s29”) with specific cis-regulatory elements is at least 90% identical to SEQ ID NO: 196. According to some embodiments, the nucleic acid sequence of ceDNA containing codon optimized human PAH version 2 r5-s29 (ceDNA “hPAH-r5-s29”) with specific cis-regulatory elements is at least 91% identical to SEQ ID NO: 196. According to some embodiments, the nucleic acid sequence of ceDNA containing codon optimized human PAH version 2 r5-s29 (ceDNA “hPAH-r5-s29”) with specific cis-regulatory elements is at least 92% identical to SEQ ID NO: 196. According to some embodiments, the nucleic acid sequence of ceDNA containing codon optimized human PAH version 2 r5-s29 (ceDNA “hPAH-r5-s29”) with specific cis-regulatory elements is at least 93% identical to SEQ ID NO: 196. According to some embodiments, the nucleic acid sequence of ceDNA containing codon optimized human PAH version 2 r5-s29 (ceDNA “hPAH-r5-s29”) with specific cis-regulatory elements is at least 94% identical to SEQ ID NO: 196. According to some embodiments, the nucleic acid sequence of ceDNA containing codon optimized human PAH version 2 r5-s29 (ceDNA “hPAH-r5-s29”) with specific cis-regulatory elements is at least 95% identical to SEQ ID NO: 196. According to some embodiments, the nucleic acid sequence of ceDNA containing codon optimized human PAH version 2 r5-s29 (ceDNA “hPAH-r5-s29”) with specific cis-regulatory elements is at least 96% identical to SEQ ID NO: 196. According to some embodiments, the nucleic acid sequence of ceDNA containing codon optimized human PAH version 2 r5-s29 (ceDNA “hPAH-r5-s29”) with specific cis-regulatory elements is at least 97% identical to SEQ ID NO: 196. According to some embodiments, the nucleic acid sequence of ceDNA containing codon optimized human PAH version 2 r5-s29 (ceDNA “hPAH-r5-s29”) with specific cis-regulatory elements is at least 98% identical to SEQ ID NO: 196. According to some embodiments, the nucleic acid sequence of ceDNA containing codon optimized human PAH version 2 r5-s29 (ceDNA “hPAH-r5-s29”)] with specific cis-regulatory elements is at least 99% identical to SEQ ID NO: 196. According to some embodiments, the nucleic acid sequence of ceDNA containing codon optimized human PAH version 2 r5-s29 (ceDNA “hPAH-r5-s29”) with specific cis-regulatory elements consists of SEQ ID NO: 196.

[0817] The nucleic acid sequence of ceDNA containing codon optimized human PAH version 2 r5-s29 (ceDNA “hPAH-r5-s29”), with specific cis-regulatory elements is shown as SEQ ID NO: 197 (ceDNA1416).

[0818] SEQ ID NO: 197 includes the following elements. left-ITR_v1, spacer_left-ITR_v2.1, 3×VanD_TTRe_PromoterSet, PmeI_site, Mod_Minimum_Consensus_Kozak, hPAH-r5-s29::hIVS1B_33bpFlanks, PacI_site, WPRE_3pUTR, bGH, spacer_right-ITR_v1, right-ITR_v1.

[0819] According to some embodiments, the nucleic acid sequence of ceDNA containing codon optimized human PAH version 2 r5-s29 (ceDNA “hPAH-r5-s29”) with specific cis-regulatory elements comprises SEQ ID NO: 197. According to some embodiments, the nucleic acid sequence of ceDNA containing codon optimized human PAH version 2 r5-s29 (ceDNA “hPAH-r5-s29”) with specific cis-regulatory elements is at least 85% identical to SEQ ID NO: 197. According to some embodiments, the nucleic acid sequence of ceDNA containing codon optimized human PAH version 2 r5-s29 (ceDNA “hPAH-r5-s29”) with specific cis-regulatory elements is at least 90% identical to SEQ ID NO: 197. According to some embodiments, the nucleic acid sequence of ceDNA containing codon optimized human PAH version 2 r5-s29 (ceDNA “hPAH-r5-s29”) with specific cis-regulatory elements is at least 91% identical to SEQ ID NO: 197. According to some embodiments, the nucleic acid sequence of ceDNA containing codon optimized human PAH version 2 r5-s29 (ceDNA “hPAH-r5-s29”) with specific cis-regulatory elements is at least 92% identical to SEQ ID NO: 197. According to some embodiments, the nucleic acid sequence of ceDNA containing codon optimized human PAH version 2 r5-s29 (ceDNA “hPAH-r5-s29”) with specific cis-regulatory elements is at least 93% identical to SEQ ID NO: 197. According to some embodiments, the nucleic acid sequence of ceDNA containing codon optimized human PAH version 2 r5-s29 (ceDNA “hPAH-r5-s29”) with specific cis-regulatory elements is at least 94% identical to SEQ ID NO: 197. According to some embodiments, the nucleic acid sequence of ceDNA containing codon optimized human PAH version 2 r5-s29 (ceDNA “hPAH-r5-s29”) with specific cis-regulatory elements is at least 95% identical to SEQ ID NO: 197. According to some embodiments, the nucleic acid sequence of ceDNA containing codon optimized human PAH version 2 r5-s29 (ceDNA “hPAH-r5-s29”) with specific cis-regulatory elements is at least 96% identical to SEQ ID NO: 197. According to some embodiments, the nucleic acid sequence of ceDNA containing codon optimized human PAH version 2 r5-s29 (ceDNA “hPAH-r5-s29”) with specific cis-regulatory elements is at least 97% identical to SEQ ID NO: 197. According to some embodiments, the nucleic acid sequence of ceDNA containing codon optimized human PAH version 2 r5-s29 (ceDNA “hPAH-r5-s29”) with specific cis-regulatory elements is at least 98% identical to SEQ ID NO: 197. According to some embodiments, the nucleic acid sequence of ceDNA containing codon optimized human PAH version 2 r5-s29 (ceDNA “hPAH-r5-s29”) with specific cis-regulatory elements is at least 99% identical to SEQ ID NO: 197. According to some embodiments, the nucleic acid sequence of ceDNA containing codon optimized human PAH version 2 r5-s29 (ceDNA “hPAH-r5-s29”) with specific cis-regulatory elements consists of SEQ ID NO: 197. The nucleic acid sequence of ceDNA containing codon optimized human PAH version 2 r5-s29 (ceDNA “hPAH-r5-s29”), with specific cis-regulatory elements is shown as SEQ ID NO: 198(ceDNA1428).

[0820] SEQ ID NO: 198 includes the following elements. left-ITR_v1, spacer_left-ITR_v2.1, 3×VanD_TTRe_PromoterSet, PmeI_site, Mod_Minimum_Consensus_Kozak, hPAH-r5-s29::mod-Intron_oIVS-v2_33bpFlanks, PacI_site, WPRE_3pUTR, bGH, spacer_right-ITR_v1, right-ITR_v1.

[0821] According to some embodiments, the nucleic acid sequence of ceDNA containing codon optimized human PAH version 2 r5-s29 (ceDNA “hPAH-r5-s29”) with specific cis-regulatory elements comprises SEQ ID NO: 198. According to some embodiments, the nucleic acid sequence of ceDNA containing codon optimized human PAH version 2 r5-s29 (ceDNA “hPAH-r5-s29”) with specific cis-regulatory elements is at least 85% identical to SEQ ID NO: 198. According to some embodiments, the nucleic acid sequence of ceDNA containing codon optimized human PAH version 2 r5-s29 (ceDNA “hPAH-r5-s29”) with specific cis-regulatory elements is at least 90% identical to SEQ ID NO: 198. According to some embodiments, the nucleic acid sequence of ceDNA containing codon optimized human PAH version 2 r5-s29 (ceDNA “hPAH-r5-s29”) with specific cis-regulatory elements is at least 91% identical to SEQ ID NO: 198. According to some embodiments, the nucleic acid sequence of ceDNA containing codon optimized human PAH version 2 r5-s29 (ceDNA “hPAH-r5-s29”) with specific cis-regulatory elements is at least 92% identical to SEQ ID NO: 198. According to some embodiments, the nucleic acid sequence of ceDNA containing codon optimized human PAH version 2 r5-s29 (ceDNA “hPAH-r5-s29”) with specific cis-regulatory elements is at least 93% identical to SEQ ID NO: 198. According to some embodiments, the nucleic acid sequence of ceDNA containing codon optimized human PAH version 2 r5-s29 (ceDNA “hPAH-r5-s29”) with specific cis-regulatory elements is at least 94% identical to SEQ ID NO: 198. According to some embodiments, the nucleic acid sequence of ceDNA containing codon optimized human PAH version 2 r5-s29 (ceDNA “hPAH-r5-s29”) with specific cis-regulatory elements is at least 95% identical to SEQ ID NO: 198. According to some embodiments, the nucleic acid sequence of ceDNA containing codon optimized human PAH version 2 r5-s29 (ceDNA “hPAH-r5-s29”) with specific cis-regulatory elements is at least 96% identical to SEQ ID NO: 198. According to some embodiments, the nucleic acid sequence of ceDNA containing codon optimized human PAH version 2 r5-s29 (ceDNA “hPAH-r5-s29”) with specific cis-regulatory elements is at least 97% identical to SEQ ID NO: 198. According to some embodiments, the nucleic acid sequence of ceDNA containing codon optimized human PAH version 2 r5-s29 (ceDNA “hPAH-r5-s29”) with specific cis-regulatory elements is at least 98% identical to SEQ ID NO: 198. According to some embodiments, the nucleic acid sequence of ceDNA containing codon optimized human PAH version 2 r5-s29 (ceDNA “hPAH-r5-s29”) with specific cis-regulatory elements is at least 99% identical to SEQ ID NO: 198. According to some embodiments, the nucleic acid sequence of ceDNA containing codon optimized human PAH version 2 r5-s29 (ceDNA “hPAH-r5-s29”) with specific cis-regulatory elements consists of SEQ ID NO: 198.

[0822] The nucleic acid sequence of ceDNA containing codon optimized human PAH version 2 (ceDNA “hPAH_codop_ORF_v2”), with specific cis-regulatory elements is shown as SEQ ID NO: 199 (ceDNA1430).

[0823] SEQ ID NO: 199 includes the following elements. left-ITR_v1, spacer_left-ITR_v2.1, 3×VanD_TTRe_PromoterSet, PmeI_site, Mod_Minimum_Consensus_Kozak, hPAH_codop_ORF_v2_mIVS-intron1B_33bpFlanks, PacI_site, WPRE_3pUTR, bGH, spacer_right-ITR_v1, right-ITR_v1.

[0824] According to some embodiments, the nucleic acid sequence of ceDNA containing codon optimized human PAH version 2 (ceDNA “hPAH_codop_ORF_v2”) with specific cis-regulatory elements comprises SEQ ID NO: 199. According to some embodiments, the nucleic acid sequence of ceDNA containing codon optimized human PAH version 2 (ceDNA “hPAH_codop_ORF_v2”) with specific cis-regulatory elements is at least 85% identical to SEQ ID NO: 199. According to some embodiments, the nucleic acid sequence of ceDNA containing codon optimized human PAH version 2 (ceDNA “hPAH_codop_ORF_v2”) with specific cis-regulatory elements is at least 90% identical to SEQ ID NO: 199. According to some embodiments, the nucleic acid sequence of ceDNA containing codon optimized human PAH version 2 (ceDNA “hPAH_codop_ORF_v2”) with specific cis-regulatory elements is at least 91% identical to SEQ ID NO: 199. According to some embodiments, the nucleic acid sequence of ceDNA containing codon optimized human PAH version 2 (ceDNA “hPAH_codop_ORF_v2”) with specific cis-regulatory elements is at least 92% identical to SEQ ID NO: 199. According to some embodiments, the nucleic acid sequence of ceDNA containing codon optimized human PAH version 2 (ceDNA “hPAH_codop_ORF_v2”) with specific cis-regulatory elements is at least 93% identical to SEQ ID NO: 199. According to some embodiments, the nucleic acid sequence of ceDNA containing codon optimized human PAH version 2 (ceDNA “hPAH_codop_ORF_v2”) with specific cis-regulatory elements is at least 94% identical to SEQ ID NO: 199. According to some embodiments, the nucleic acid sequence of ceDNA containing codon optimized human PAH version 2 (ceDNA “hPAH_codop_ORF_v2”) with specific cis-regulatory elements is at least 95% identical to SEQ ID NO: 199. According to some embodiments, the nucleic acid sequence of ceDNA containing codon optimized human PAH version 2 (ceDNA “hPAH_codop_ORF_v2”) with specific cis-regulatory elements is at least 96% identical to SEQ ID NO: 199. According to some embodiments, the nucleic acid sequence of ceDNA containing codon optimized human PAH version 2 (ceDNA “hPAH_codop_ORF_v2”) with specific cis-regulatory elements is at least 97% identical to SEQ ID NO: 199. According to some embodiments, the nucleic acid sequence of ceDNA containing codon optimized human PAH version 2 (ceDNA “hPAH_codop_ORF_v2”) with specific cis-regulatory elements is at least 98% identical to SEQ ID NO: 199. According to some embodiments, the nucleic acid sequence of ceDNA containing codon optimized human PAH version 2 (ceDNA “hPAH_codop_ORF_v2”) with specific cis-regulatory elements is at least 99% identical to SEQ ID NO: 199. According to some embodiments, the nucleic acid sequence of ceDNA containing codon optimized human PAH version 2 (ceDNA “hPAH_codop_ORF_v2”) with specific cis-regulatory elements consists of SEQ ID NO: 199.

[0825] The nucleic acid sequence of ceDNA containing codon optimized human PAH version 2 (ceDNA “hPAH_codop_ORF_v2”), with specific cis-regulatory elements is shown as SEQ ID NO: 200 (ceDNA1432).

(SEQ ID NO: 200)
CCTGCAGGCAGCTGCGCGCTCGCTCGCTCACTGAGGCCGC
CCGGGCAAAGCCCGGGCGTCGGGCGACCTTTGGTCGCCCG
GCCTCAGTGAGCGAGCGAGCGCGCAGAGAGGGAGTGGCCA
ACTCCATCACTAGGGGTTCCTTGTAGTTAATGATTAACCC
GCCATGCTACTTATCGCGGCCGCGGGGGAGGCTGCTGGTG
AATATTAACCAAGGTCACCCCAGTTATCGGAGGAGCAAAC
AGGGGCTAAGTCCACCGGGGGAGGCTGCTGGTGAATATTA
ACCAAGGTCACCCCAGTTATCGGAGGAGCAAACAGGGGCT
AAGTCCACCGGGGGAGGCTGCTGGTGAATATTAACCAAGG
TCACCCCAGTTATCGGAGGAGCAAACAGGGGCTAAGTCCA
CGGTACCCACTGGGAGGATGTTGAGTAAGATGGAAAACTA
CTGATGACCCTTGCAGAGACAGAGTATTAGGACATGTTTG
AACAGGGGCCGGGCGATCAGCAGGTAGCTCTAGAGGATCC
CCGTCTGTCTGCACATTTCGTAGAGCGAGTGTTCCGATAC
TCTAATCTCCCTAGGCAAGGTTCATATTTGTGTAGGTTAC
TTATTCTCCTTTTGTTGACTAAGTCAATAATCAGAATCAG
CAGGTTTGGAGTCAGCTTGGCAGGGATCAGCAGCCTGGGT
TGGAAGGAGGGGGTATAAAAGCCCCTTCACCAGGAGAAGC
CGTCACACAGATCCACAAGCTCCTGAAGAGGTAAGGGTTT
AAGGGATGGTTGGTTGGTGGGGTATTAATGTTTAATTACC
TGGAGCACCTGCCTGAAATCACTTTTTTTCAGGTTGGGTT
TAAACCGCAGCCACCATGAGCACCGCCGTGCTGGAAAATC
CTGGCTTGGGCAGGAAACTCTCTGACTTTGGACAGGTGAG
CCACGGCAGCCTGAGCTGCTCAGTTAGGGGAATTTGGGCC
TCCAGAGAAAGAGATCCGAAGACTGCTGGTGCTTCCTGGT
TTCATAAGCTCAGTAAGAAGTCTGAATTCGTTGGAAGCTG
ATGATAGAAGAAAGAGTTCATGCTTGCTTTGTCCATGGAG
GTTTAACAGGAATGAATTGCTAAACTGTGGAAAATGTTTT
AAACAAATGCATCTTATCCTGTAGGAAACAAGCTATATTG
AAGACAACTGCAATCAAAACGGCGCCATCAGCCTGATCTT
CAGCCTGAAAGAAGAAGTGGGCGCCCTGGCCAAGGTGCTG
AGACTGTTCGAAGAGAACGACGTGAACCTGACACACATCG
AGAGCAGACCCAGCAGACTGAAGAAGGACGAGTACGAGTT
CTTCACCCACCTGGACAAGCGGAGCCTGCCTGCTCTGACC
AACATCATCAAGATCCTGCGGCACGACATCGGCGCCACAG
TGCACGAACTGAGCCGGGACAAGAAAAAGGACACCGTGCC
ATGGTTCCCCAGAACCATCCAAGAGCTGGACAGATTCGCC
AACCAGATCCTGAGCTATGGCGCCGAGCTGGACGCTGATC
ACCCTGGCTTTAAGGACCCCGTGTACCGGGCCAGAAGAAA
GCAGTTTGCCGATATCGCCTACAACTACCGGCACGGCCAG
CCTATTCCTCGGGTCGAGTACATGGAAGAGGAAAAGAAAA
CCTGGGGCACCGTGTTCAAGACCCTGAAGTCCCTGTACAA
GACCCACGCCTGCTACGAGTACAACCACATCTTCCCACTG
CTCGAAAAGTACTGCGGCTTCCACGAGGACAATATCCCTC
AGCTTGAGGACGTGTCCCAGTTCCTGCAGACCTGCACCGG
CTTTAGACTGAGGCCAGTTGCCGGACTGCTGAGCAGCAGA
GATTTTCTCGGCGGCCTGGCCTTCAGAGTGTTCCACTGTA
CCCAGTACATCAGACACGGCAGCAAGCCCATGTACACCCC
TGAGCCTGATATCTGCCACGAGCTGCTGGGACATGTGCCC
CTGTTCAGCGATAGAAGCTTCGCCCAGTTCAGCCAAGAGA
TCGGACTGGCTTCTCTGGGAGCCCCTGACGAGTACATTGA
GAAGCTGGCCACCATCTACTGGTTCACCGTGGAATTCGGC
CTGTGCAAGCAGGGCGACAGCATCAAAGCTTATGGCGCTG
GCCTGCTGTCTAGCTTCGGCGAGCTGCAGTACTGTCTGAG
CGAGAAGCCTAAGCTGCTGCCCCTGGAACTGGAAAAGACC
GCCATCCAGAACTACACCGTGACCGAGTTCCAGCCTCTGT
ACTACGTGGCCGAGAGCTTCAACGACGCCAAAGAAAAAGT
GCGGAACTTCGCCGCCACCATTCCTCGGCCTTTCAGCGTC
AGATACGACCCCTACACACAGCGGATCGAGGTGCTGGACA
ACACACAGCAGCTGAAAATTCTGGCCGACTCCATCAACAG
CGAGATCGGCATCCTGTGCAGCGCCCTGCAGAAAATCAAG
TGAtagTTAATTAAGAGCATCTTACCGCCATTTATTCCCA
TATTTGTTCTGTTTTTCTTGATTTGGGTATACATTTAAAT
GTTAATAAAACAAAATGGTGGGGCAATCATTTACATTTTT
AGGGATATGTAATTACTAGTTCAGGTGTATTGCCACAAGA
CAAACATGTTAAGAAACTTTCCCGTTATTTACGCTCTGTT
CCTGTTAATCAACCTCTGGATTACAAAATTTGTGAAAGAT
TGACTGATATTCTTAACTATGTTGCTCCTTTTACGCTGTG
TGGATATGCTGCTTTATAGCCTCTGTATCTAGCTATTGCT
TCCCGTACGGCTTTCGTTTTCTCCTCCTTGTATAAATCCT
GGTTGCTGTCTCTTTTAGAGGAGTTGTGGCCCGTTGTCCG
TCAACGTGGCGTGGTGTGCTCTGTGTTTGCTGACGCAACC
CCCACTGGCTGGGGCATTGCCACCACCTGTCAACTCCTTT
CTGGGACTTTCGCTTTCCCCCTCCCGATCGCCACGGCAGA
ACTCATCGCCGCCTGCCTTGCCCGCTGCTGGACAGGGGCT
AGGTTGCTGGGCACTGATAATTCCGTGGTGTTGTCTGTGC
CTTCTAGTTGCCAGCCATCTGTTGTTTGCCCCTCCCCCGT
GCCTTCCTTGACCCTGGAAGGTGCCACTCCCACTGTCCTT
TCCTAATAAAATGAGGAAATTGCATCGCATTGTCTGAGTA
GGTGTCATTCTATTCTGGGGGGTGGGGTGGGGCAGGACAG
CAAGGGGGAGGATTGGGAAGACAATAGCAGGCATGCTGGG
GATGCGGTGGGCTCTATGGCTCTAGAGCATGGCTACGTAG
ATAAGTAGCATGGCGGGTTAATCATTAACTACACCTGCAG
GAGGAACCCCTAGTGATGGAGTTGGCCACTCCCTCTCTGC
GCGCTCGCTCGCTCACTGAGGCCGGGCGACCAAAGGTCGC
CCGACGCCCGGGCGGCCTCAGTGAGCGAGCGAGCGCGCAG
CTGCCTGCAGG

[0826] SEQ ID NO: 200 includes the following elements. left-ITR_v1, spacer_left-ITR_v2.1, 3×VanD_TTRe_PromoterSet, PmeI_site, Mod_Minimum_Consensus_Kozak, hPAH_codop_ORF_v2_modified_Intron1_33bpFlanks, PacI_site, WPRE_3pUTR, bGH, spacer_right-ITR_v1, right-ITR_v1.

[0827] According to some embodiments, the nucleic acid sequence of ceDNA containing codon optimized human PAH version 2 (ceDNA “hPAH_codop_ORF_v2”) with specific cis-regulatory elements comprises SEQ ID NO: 200. According to some embodiments, the nucleic acid sequence of ceDNA containing codon optimized human PAH version 2 (ceDNA “hPAH_codop_ORF_v2”) with specific cis-regulatory elements is at least 85% identical to SEQ ID NO: 200. According to some embodiments, the nucleic acid sequence of ceDNA containing codon optimized human PAH version 2 (ceDNA “hPAH_codop_ORF_v2”) with specific cis-regulatory elements is at least 90% identical to SEQ ID NO: 200. According to some embodiments, the nucleic acid sequence of ceDNA containing codon optimized human PAH version 2 (ceDNA “hPAH_codop_ORF_v2”) with specific cis-regulatory elements is at least 91% identical to SEQ ID NO: 200. According to some embodiments, the nucleic acid sequence of ceDNA containing codon optimized human PAH version 2 (ceDNA “hPAH_codop_ORF_v2”) with specific cis-regulatory elements is at least 92% identical to SEQ ID NO: 200. According to some embodiments, the nucleic acid sequence of ceDNA containing codon optimized human PAH version 2 (ceDNA “hPAH_codop_ORF_v2”) with specific cis-regulatory elements is at least 93% identical to SEQ ID NO: 200. According to some embodiments, the nucleic acid sequence of ceDNA containing codon optimized human PAH version 2 (ceDNA “hPAH_codop_ORF_v2”) with specific cis-regulatory elements is at least 94% identical to SEQ ID NO: 200. According to some embodiments, the nucleic acid sequence of ceDNA containing codon optimized human PAH version 2 (ceDNA “hPAH_codop_ORF_v2”) with specific cis-regulatory elements is at least 95% identical to SEQ ID NO: 200. According to some embodiments, the nucleic acid sequence of ceDNA containing codon optimized human PAH version 2 (ceDNA “hPAH_codop_ORF_v2”) with specific cis-regulatory elements is at least 96% identical to SEQ ID NO: 200. According to some embodiments, the nucleic acid sequence of ceDNA containing codon optimized human PAH version 2 (ceDNA “hPAH_codop_ORF_v2”) with specific cis-regulatory elements is at least 97% identical to SEQ ID NO: 200. According to some embodiments, the nucleic acid sequence of ceDNA containing codon optimized human PAH version 2 (ceDNA “hPAH_codop_ORF_v2”) with specific cis-regulatory elements is at least 98% identical to SEQ ID NO: 200. According to some embodiments, the nucleic acid sequence of ceDNA containing codon optimized human PAH version 2 (ceDNA “hPAH_codop_ORF_v2”) with specific cis-regulatory elements is at least 99% identical to SEQ ID NO: 200. According to some embodiments, the nucleic acid sequence of ceDNA containing codon optimized human PAH version 2 (ceDNA “hPAH_codop_ORF_v2”) with specific cis-regulatory elements consists of SEQ ID NO: 200.

[0828] The nucleic acid sequence of ceDNA containing codon optimized human PAH version 2 (ceDNA “hPAH_codop_ORF_v2”), with specific cis-regulatory elements is shown as SEQ ID NO: 201 (ceDNA1436).

[0829] SEQ ID NO: 202 includes the following elements. left-ITR_v1, spacer_left-ITR_v2.1, hAAT(979)_PromoterSet, PmeI_site, Mod_Minimum_Consensus_Kozak, hPAH_codop_ORF_v2, PacI_site, WPRE_3pUTR, bGH, spacer_right-ITR_v1, right-ITR_v1.

[0830] According to some embodiments, the nucleic acid sequence of ceDNA containing codon optimized human PAH version 2 (ceDNA “hPAH_codop_ORF_v2”) with specific cis-regulatory elements comprises SEQ ID NO: 201. According to some embodiments, the nucleic acid sequence of ceDNA containing codon optimized human PAH version 2 (ceDNA “hPAH_codop_ORF_v2”) with specific cis-regulatory elements is at least 85% identical to SEQ ID NO: 201. According to some embodiments, the nucleic acid sequence of ceDNA containing codon optimized human PAH version 2 (ceDNA “hPAH_codop_ORF_v2”) with specific cis-regulatory elements is at least 90% identical to SEQ ID NO: 201. According to some embodiments, the nucleic acid sequence of ceDNA containing codon optimized human PAH version 2 (ceDNA “hPAH_codop_ORF_v2”) with specific cis-regulatory elements is at least 91% identical to SEQ ID NO: 201. According to some embodiments, the nucleic acid sequence of ceDNA containing codon optimized human PAH version 2 (ceDNA “hPAH_codop_ORF_v2”) with specific cis-regulatory elements is at least 92% identical to SEQ ID NO: 201. According to some embodiments, the nucleic acid sequence of ceDNA containing codon optimized human PAH version 2 (ceDNA “hPAH_codop_ORF_v2”) with specific cis-regulatory elements is at least 93% identical to SEQ ID NO: 201. According to some embodiments, the nucleic acid sequence of ceDNA containing codon optimized human PAH version 2 (ceDNA “hPAH_codop_ORF_v2”) with specific cis-regulatory elements is at least 94% identical to SEQ ID NO: 201. According to some embodiments, the nucleic acid sequence of ceDNA containing codon optimized human PAH version 2 (ceDNA “hPAH_codop_ORF_v2”) with specific cis-regulatory elements is at least 95% identical to SEQ ID NO: 201. According to some embodiments, the nucleic acid sequence of ceDNA containing codon optimized human PAH version 2 (ceDNA “hPAH_codop_ORF_v2”) with specific cis-regulatory elements is at least 96% identical to SEQ ID NO: 201. According to some embodiments, the nucleic acid sequence of ceDNA containing codon optimized human PAH version 2 (ceDNA “hPAH_codop_ORF_v2”) with specific cis-regulatory elements is at least 97% identical to SEQ ID NO: 201. According to some embodiments, the nucleic acid sequence of ceDNA containing codon optimized human PAH version 2 (ceDNA “hPAH_codop_ORF_v2”) with specific cis-regulatory elements is at least 98% identical to SEQ ID NO: 201. According to some embodiments, the nucleic acid sequence of ceDNA containing codon optimized human PAH version 2 (ceDNA “hPAH_codop_ORF_v2”) with specific cis-regulatory elements is at least 99% identical to SEQ ID NO: 201. According to some embodiments, the nucleic acid sequence of ceDNA containing codon optimized human PAH version 2 (ceDNA “hPAH_codop_ORF_v2”) with specific cis-regulatory elements consists of SEQ ID NO: 201.

[0831] The nucleic acid sequence of ceDNA containing codon optimized human PAH version 2 (ceDNA “hPAH_codop_ORF_v2”), with specific cis-regulatory elements is shown as SEQ ID NO: 202 (ceDNA1458).

[0832] SEQ ID NO: 202 includes the following elements. left-ITR_v1, spacer_left-ITR_v2.1, VD_PromoterSet, PmeI_site, Mod_Minimum_Consensus_Kozak, hPAH_codop_ORF_v2, PacI_site, HBBv2_3pUTR, SV40_polyA, spacer_right-ITR_v1, right-ITR_v1.

[0833] According to some embodiments, the nucleic acid sequence of ceDNA containing codon optimized human PAH version 2 (ceDNA “hPAH_codop_ORF_v2”) with specific cis-regulatory elements comprises SEQ ID NO: 202. According to some embodiments, the nucleic acid sequence of ceDNA containing codon optimized human PAH version 2 (ceDNA “hPAH_codop_ORF_v2”) with specific cis-regulatory elements is at least 85% identical to SEQ ID NO: 202. According to some embodiments, the nucleic acid sequence of ceDNA containing codon optimized human PAH version 2 (ceDNA “hPAH_codop_ORF_v2”) with specific cis-regulatory elements is at least 90% identical to SEQ ID NO: 202. According to some embodiments, the nucleic acid sequence of ceDNA containing codon optimized human PAH version 2 (ceDNA “hPAH_codop_ORF_v2”) with specific cis-regulatory elements is at least 91% identical to SEQ ID NO: 202. According to some embodiments, the nucleic acid sequence of ceDNA containing codon optimized human PAH version 2 (ceDNA “hPAH_codop_ORF_v2”) with specific cis-regulatory elements is at least 92% identical to SEQ ID NO: 202. According to some embodiments, the nucleic acid sequence of ceDNA containing codon optimized human PAH version 2 (ceDNA “hPAH_codop_ORF_v2”) with specific cis-regulatory elements is at least 93% identical to SEQ ID NO: 202. According to some embodiments, the nucleic acid sequence of ceDNA containing codon optimized human PAH version 2 (ceDNA “hPAH_codop_ORF_v2”) with specific cis-regulatory elements is at least 94% identical to SEQ ID NO: 202. According to some embodiments, the nucleic acid sequence of ceDNA containing codon optimized human PAH version 2 (ceDNA “hPAH_codop_ORF_v2”) with specific cis-regulatory elements is at least 95% identical to SEQ ID NO: 202. According to some embodiments, the nucleic acid sequence of ceDNA containing codon optimized human PAH version 2 (ceDNA “hPAH_codop_ORF_v2”) with specific cis-regulatory elements is at least 96% identical to SEQ ID NO: 202. According to some embodiments, the nucleic acid sequence of ceDNA containing codon optimized human PAH version 2 (ceDNA “hPAH_codop_ORF_v2”) with specific cis-regulatory elements is at least 97% identical to SEQ ID NO: 202. According to some embodiments, the nucleic acid sequence of ceDNA containing codon optimized human PAH version 2 (ceDNA “hPAH_codop_ORF_v2”) with specific cis-regulatory elements is at least 98% identical to SEQ ID NO: 202. According to some embodiments, the nucleic acid sequence of ceDNA containing codon optimized human PAH version 2 (ceDNA “hPAH_codop_ORF_v2”) with specific cis-regulatory elements is at least 99% identical to SEQ ID NO: 202. According to some embodiments, the nucleic acid sequence of ceDNA containing codon optimized human PAH version 2 (ceDNA “hPAH_codop_ORF_v2”) with specific cis-regulatory elements consists of SEQ ID NO: 202.

[0834] The nucleic acid sequence of ceDNA containing codon optimized human PAH version 2 (ceDNA “hPAH_codop_ORF_v2”), with specific cis-regulatory elements is shown as SEQ ID NO: 203 (ceDNA1459).

[0835] SEQ ID NO: 203 includes the following elements. 1 left-ITR_v1, spacer_left-ITR_v2.1, VD_PromoterSet, PmeI_site, Mod_Minimum_Consensus_Kozak, hPAH_codop_ORF_v2, PacI_site, HBBv3_3pUTR, SV40_polyA, spacer_right-ITR_v1, right-ITR_v1.

[0836] According to some embodiments, the nucleic acid sequence of ceDNA containing codon optimized human PAH version 2 (ceDNA “hPAH_codop_ORF_v2”) with specific cis-regulatory elements comprises SEQ ID NO: 203. According to some embodiments, the nucleic acid sequence of ceDNA containing codon optimized human PAH version 2 (ceDNA “hPAH_codop_ORF_v2”) with specific cis-regulatory elements is at least 85% identical to SEQ ID NO: 203. According to some embodiments, the nucleic acid sequence of ceDNA containing codon optimized human PAH version 2 (ceDNA “hPAH_codop_ORF_v2”) with specific cis-regulatory elements is at least 90% identical to SEQ ID NO: 203. According to some embodiments, the nucleic acid sequence of ceDNA containing codon optimized human PAH version 2 (ceDNA “hPAH_codop_ORF_v2”) with specific cis-regulatory elements is at least 91% identical to SEQ ID NO: 203. According to some embodiments, the nucleic acid sequence of ceDNA containing codon optimized human PAH version 2 (ceDNA “hPAH_codop_ORF_v2”) with specific cis-regulatory elements is at least 92% identical to SEQ ID NO: 203. According to some embodiments, the nucleic acid sequence of ceDNA containing codon optimized human PAH version 2 (ceDNA “hPAH_codop_ORF_v2”) with specific cis-regulatory elements is at least 93% identical to SEQ ID NO: 203. According to some embodiments, the nucleic acid sequence of ceDNA containing codon optimized human PAH version 2 (ceDNA “hPAH_codop_ORF_v2”) with specific cis-regulatory elements is at least 94% identical to SEQ ID NO: 203. According to some embodiments, the nucleic acid sequence of ceDNA containing codon optimized human PAH version 2 (ceDNA “hPAH_codop_ORF_v2”) with specific cis-regulatory elements is at least 95% identical to SEQ ID NO: 203. According to some embodiments, the nucleic acid sequence of ceDNA containing codon optimized human PAH version 2 (ceDNA “hPAH_codop_ORF_v2”) with specific cis-regulatory elements is at least 96% identical to SEQ ID NO: 203. According to some embodiments, the nucleic acid sequence of ceDNA containing codon optimized human PAH version 2 (ceDNA “hPAH_codop_ORF_v2”) with specific cis-regulatory elements is at least 97% identical to SEQ ID NO: 203. According to some embodiments, the nucleic acid sequence of ceDNA containing codon optimized human PAH version 2 (ceDNA “hPAH_codop_ORF_v2”) with specific cis-regulatory elements is at least 98% identical to SEQ ID NO: 203. According to some embodiments, the nucleic acid sequence of ceDNA containing codon optimized human PAH version 2 (ceDNA “hPAH_codop_ORF_v2”) with specific cis-regulatory elements is at least 99% identical to SEQ ID NO: 203. According to some embodiments, the nucleic acid sequence of ceDNA containing codon optimized human PAH version 2 (ceDNA “hPAH_codop_ORF_v2”) with specific cis-regulatory elements consists of SEQ ID NO: 203.

[0837] The nucleic acid sequence of ceDNA containing codon optimized human PAH version 2 (ceDNA “hPAH_codop_ORF_v2”), with specific cis-regulatory elements is shown as SEQ ID NO: 204 (ceDNA1464).

[0838] SEQ ID NO: 204 includes the following elements. left-ITR_v1, spacer_left-ITR_v2.1, VD_PromoterSet, PmeI_site, Mod_Minimum_Consensus_Kozak, hPAH_codop_ORF_v2, PacI_site, WPRE_3pUTR, SV40_polyA, spacer_right-ITR_v1, right-ITR_v1.

[0839] According to some embodiments, the nucleic acid sequence of ceDNA containing codon optimized human PAH version 2 (ceDNA “hPAH_codop_ORF_v2”) with specific cis-regulatory elements comprises SEQ ID NO: 204. According to some embodiments, the nucleic acid sequence of ceDNA containing codon optimized human PAH version 2 (ceDNA “hPAH_codop_ORF_v2”) with specific cis-regulatory elements is at least 85% identical to SEQ ID NO: 204. According to some embodiments, the nucleic acid sequence of ceDNA containing codon optimized human PAH version 2 (ceDNA “hPAH_codop_ORF_v2”) with specific cis-regulatory elements is at least 90% identical to SEQ ID NO: 204. According to some embodiments, the nucleic acid sequence of ceDNA containing codon optimized human PAH version 2 (ceDNA “hPAH_codop_ORF_v2”) with specific cis-regulatory elements is at least 91% identical to SEQ ID NO: 204. According to some embodiments, the nucleic acid sequence of ceDNA containing codon optimized human PAH version 2 (ceDNA “hPAH_codop_ORF_v2”) with specific cis-regulatory elements is at least 92% identical to SEQ ID NO: 204. According to some embodiments, the nucleic acid sequence of ceDNA containing codon optimized human PAH version 2 (ceDNA “hPAH_codop_ORF_v2”) with specific cis-regulatory elements is at least 93% identical to SEQ ID NO: 204. According to some embodiments, the nucleic acid sequence of ceDNA containing codon optimized human PAH version 2 (ceDNA “hPAH_codop_ORF_v2”) with specific cis-regulatory elements is at least 94% identical to SEQ ID NO: 204. According to some embodiments, the nucleic acid sequence of ceDNA containing codon optimized human PAH version 2 (ceDNA “hPAH_codop_ORF_v2”) with specific cis-regulatory elements is at least 95% identical to SEQ ID NO: 204. According to some embodiments, the nucleic acid sequence of ceDNA containing codon optimized human PAH version 2 (ceDNA “hPAH_codop_ORF_v2”) with specific cis-regulatory elements is at least 96% identical to SEQ ID NO: 204. According to some embodiments, the nucleic acid sequence of ceDNA containing codon optimized human PAH version 2 (ceDNA “hPAH_codop_ORF_v2”) with specific cis-regulatory elements is at least 97% identical to SEQ ID NO: 204. According to some embodiments, the nucleic acid sequence of ceDNA containing codon optimized human PAH version 2 (ceDNA “hPAH_codop_ORF_v2”) with specific cis-regulatory elements is at least 98% identical to SEQ ID NO: 204. According to some embodiments, the nucleic acid sequence of ceDNA containing codon optimized human PAH version 2 (ceDNA “hPAH_codop_ORF_v2”) with specific cis-regulatory elements is at least 99% identical to SEQ ID NO: 204. According to some embodiments, the nucleic acid sequence of ceDNA containing codon optimized human PAH version 2 (ceDNA “hPAH_codop_ORF_v2”) with specific cis-regulatory elements consists of SEQ ID NO: 204.

[0840] The nucleic acid sequence of ceDNA containing codon optimized human PAH version 2 (ceDNA “hPAH_codop_ORF_v2”), with specific cis-regulatory elements is shown as SEQ ID NO: 205 (ceDNA1466).

[0841] SEQ ID NO: 205 includes the following elements. left-ITR_v1, spacer_left-ITR_v2.1, VD_PromoterSet, PmeI_site, Mod_Minimum_Consensus_Kozak, hPAH_codop_ORF_v2, PacI_site, WPRE_3pUTR, HBBv2_3pUTR, spacer_right-ITR_v1, right-ITR_v1.

[0842] According to some embodiments, the nucleic acid sequence of ceDNA containing codon optimized human PAH version 2 (ceDNA “hPAH_codop_ORF_v2”) with specific cis-regulatory elements comprises SEQ ID NO: 205. According to some embodiments, the nucleic acid sequence of ceDNA containing codon optimized human PAH version 2 (ceDNA “hPAH_codop_ORF_v2”) with specific cis-regulatory elements is at least 85% identical to SEQ ID NO: 205. According to some embodiments, the nucleic acid sequence of ceDNA containing codon optimized human PAH version 2 (ceDNA “hPAH_codop_ORF_v2”) with specific cis-regulatory elements is at least 90% identical to SEQ ID NO: 205. According to some embodiments, the nucleic acid sequence of ceDNA containing codon optimized human PAH version 2 (ceDNA “hPAH_codop_ORF_v2”) with specific cis-regulatory elements is at least 91% identical to SEQ ID NO: 205. According to some embodiments, the nucleic acid sequence of ceDNA containing codon optimized human PAH version 2 (ceDNA “hPAH_codop_ORF_v2”) with specific cis-regulatory elements is at least 92% identical to SEQ ID NO: 205. According to some embodiments, the nucleic acid sequence of ceDNA containing codon optimized human PAH version 2 (ceDNA “hPAH_codop_ORF_v2”) with specific cis-regulatory elements is at least 93% identical to SEQ ID NO: 205. According to some embodiments, the nucleic acid sequence of ceDNA containing codon optimized human PAH version 2 (ceDNA “hPAH_codop_ORF_v2”) with specific cis-regulatory elements is at least 94% identical to SEQ ID NO: 205. According to some embodiments, the nucleic acid sequence of ceDNA containing codon optimized human PAH version 2 (ceDNA “hPAH_codop_ORF_v2”) with specific cis-regulatory elements is at least 95% identical to SEQ ID NO: 205. According to some embodiments, the nucleic acid sequence of ceDNA containing codon optimized human PAH version 2 (ceDNA “hPAH_codop_ORF_v2”) with specific cis-regulatory elements is at least 96% identical to SEQ ID NO: 205. According to some embodiments, the nucleic acid sequence of ceDNA containing codon optimized human PAH version 2 (ceDNA “hPAH_codop_ORF_v2”) with specific cis-regulatory elements is at least 97% identical to SEQ ID NO: 205. According to some embodiments, the nucleic acid sequence of ceDNA containing codon optimized human PAH version 2 (ceDNA “hPAH_codop_ORF_v2”) with specific cis-regulatory elements is at least 98% identical to SEQ ID NO: 205. According to some embodiments, the nucleic acid sequence of ceDNA containing codon optimized human PAH version 2 (ceDNA “hPAH_codop_ORF_v2”) with specific cis-regulatory elements is at least 99% identical to SEQ ID NO: 205. According to some embodiments, the nucleic acid sequence of ceDNA containing codon optimized human PAH version 2 (ceDNA “hPAH_codop_ORF_v2”) with specific cis-regulatory elements consists of SEQ ID NO: 205.

[0843] The nucleic acid sequence of ceDNA containing codon optimized human PAH version 2 (ceDNA “hPAH_codop_ORF_v2”), with specific cis-regulatory elements is shown as SEQ ID NO: 206 (ceDNA1471).

[0844] SEQ ID NO: 206 includes the following elements. left-ITR_v1, spacer_left-ITR_v2.1, 3×HNF1-4_ProEnh_10mer, BamHI_site, TTR_liver_specific_Promoter, MVM_intron, PmeI_site, Mod_Minimum_Consensus_Kozak, hPAH_codop_ORF_v2, PacI_site, WPRE_3pUTR, bGH, spacer_right-ITR_v1, right-ITR_v1.

[0845] According to some embodiments, the nucleic acid sequence of ceDNA containing codon optimized human PAH version 2 (ceDNA “hPAH_codop_ORF_v2”) with specific cis-regulatory elements comprises SEQ ID NO: 206. According to some embodiments, the nucleic acid sequence of ceDNA containing codon optimized human PAH version 2 (ceDNA “hPAH_codop_ORF_v2”) with specific cis-regulatory elements is at least 85% identical to SEQ ID NO: 206. According to some embodiments, the nucleic acid sequence of ceDNA containing codon optimized human PAH version 2 (ceDNA “hPAH_codop_ORF_v2”) with specific cis-regulatory elements is at least 90% identical to SEQ ID NO: 206. According to some embodiments, the nucleic acid sequence of ceDNA containing codon optimized human PAH version 2 (ceDNA “hPAH_codop_ORF_v2”) with specific cis-regulatory elements is at least 91% identical to SEQ ID NO: 206. According to some embodiments, the nucleic acid sequence of ceDNA containing codon optimized human PAH version 2 (ceDNA “hPAH_codop_ORF_v2”) with specific cis-regulatory elements is at least 92% identical to SEQ ID NO: 206. According to some embodiments, the nucleic acid sequence of ceDNA containing codon optimized human PAH version 2 (ceDNA “hPAH_codop_ORF_v2”) with specific cis-regulatory elements is at least 93% identical to SEQ ID NO: 206. According to some embodiments, the nucleic acid sequence of ceDNA containing codon optimized human PAH version 2 (ceDNA “hPAH_codop_ORF_v2”) with specific cis-regulatory elements is at least 94% identical to SEQ ID NO: 206. According to some embodiments, the nucleic acid sequence of ceDNA containing codon optimized human PAH version 2 (ceDNA “hPAH_codop_ORF_v2”) with specific cis-regulatory elements is at least 95% identical to SEQ ID NO: 206. According to some embodiments, the nucleic acid sequence of ceDNA containing codon optimized human PAH version 2 (ceDNA “hPAH_codop_ORF_v2”) with specific cis-regulatory elements is at least 96% identical to SEQ ID NO: 206. According to some embodiments, the nucleic acid sequence of ceDNA containing codon optimized human PAH version 2 (ceDNA “hPAH_codop_ORF_v2”) with specific cis-regulatory elements is at least 97% identical to SEQ ID NO: 206. According to some embodiments, the nucleic acid sequence of ceDNA containing codon optimized human PAH version 2 (ceDNA “hPAH_codop_ORF_v2”) with specific cis-regulatory elements is at least 98% identical to SEQ ID NO: 206. According to some embodiments, the nucleic acid sequence of ceDNA containing codon optimized human PAH version 2 (ceDNA “hPAH_codop_ORF_v2”) with specific cis-regulatory elements is at least 99% identical to SEQ ID NO: 206. According to some embodiments, the nucleic acid sequence of ceDNA containing codon optimized human PAH version 2 (ceDNA “hPAH_codop_ORF_v2”) with specific cis-regulatory elements consists of SEQ ID NO: 206.

[0846] The nucleic acid sequence of ceDNA containing codon optimized human PAH version 2 (ceDNA “hPAH_codop_ORF_v2”), with specific cis-regulatory elements is shown as SEQ ID NO: 207 (ceDNA1472).

[0847] SEQ ID NO: 207 includes the following elements. left-ITR_v1, spacer_left-ITR_v2.1, 3×HNF1-4_ProEnh_10mer, HS-CRM8_SERP_Enhancer_nospacer, HS-CRM8_SERP_Enhancer_nospacer, BamHI_site, TTR_liver_specific_Promoter, MVM_intron, PmeI_site, Mod_Minimum_Consensus_Kozak, hPAH_codop_ORF_v2, PacI_site, WPRE_3pUTR, bGH, spacer_right-ITR_v1, right-ITR_v1.

[0848] According to some embodiments, the nucleic acid sequence of ceDNA containing codon optimized human PAH version 2 (ceDNA “hPAH_codop_ORF_v2”) with specific cis-regulatory elements comprises SEQ ID NO: 207. According to some embodiments, the nucleic acid sequence of ceDNA containing codon optimized human PAH version 2 (ceDNA “hPAH_codop_ORF_v2”) with specific cis-regulatory elements is at least 85% identical to SEQ ID NO: 207. According to some embodiments, the nucleic acid sequence of ceDNA containing codon optimized human PAH version 2 (ceDNA “hPAH_codop_ORF_v2”) with specific cis-regulatory elements is at least 90% identical to SEQ ID NO: 207. According to some embodiments, the nucleic acid sequence of ceDNA containing codon optimized human PAH version 2 (ceDNA “hPAH_codop_ORF_v2”) with specific cis-regulatory elements is at least 91% identical to SEQ ID NO: 207. According to some embodiments, the nucleic acid sequence of ceDNA containing codon optimized human PAH version 2 (ceDNA “hPAH_codop_ORF_v2”) with specific cis-regulatory elements is at least 92% identical to SEQ ID NO: 207. According to some embodiments, the nucleic acid sequence of ceDNA containing codon optimized human PAH version 2 (ceDNA “hPAH_codop_ORF_v2”) with specific cis-regulatory elements is at least 93% identical to SEQ ID NO: 207. According to some embodiments, the nucleic acid sequence of ceDNA containing codon optimized human PAH version 2 (ceDNA “hPAH_codop_ORF_v2”) with specific cis-regulatory elements is at least 94% identical to SEQ ID NO: 207. According to some embodiments, the nucleic acid sequence of ceDNA containing codon optimized human PAH version 2 (ceDNA “hPAH_codop_ORF_v2”) with specific cis-regulatory elements is at least 95% identical to SEQ ID NO: 207. According to some embodiments, the nucleic acid sequence of ceDNA containing codon optimized human PAH version 2 (ceDNA “hPAH_codop_ORF_v2”) with specific cis-regulatory elements is at least 96% identical to SEQ ID NO: 207. According to some embodiments, the nucleic acid sequence of ceDNA containing codon optimized human PAH version 2 (ceDNA “hPAH_codop_ORF_v2”) with specific cis-regulatory elements is at least 97% identical to SEQ ID NO: 207. According to some embodiments, the nucleic acid sequence of ceDNA containing codon optimized human PAH version 2 (ceDNA “hPAH_codop_ORF_v2”) with specific cis-regulatory elements is at least 98% identical to SEQ ID NO: 207. According to some embodiments, the nucleic acid sequence of ceDNA containing codon optimized human PAH version 2 (ceDNA “hPAH_codop_ORF_v2”) with specific cis-regulatory elements is at least 99% identical to SEQ ID NO: 207. According to some embodiments, the nucleic acid sequence of ceDNA containing codon optimized human PAH version 2 (ceDNA “hPAH_codop_ORF_v2”) with specific cis-regulatory elements consists of SEQ ID NO: 207.

[0849] The nucleic acid sequence of ceDNA containing codon optimized human PAH version 2 (ceDNA “hPAH_codop_ORF_v2”), with specific cis-regulatory elements is shown as SEQ ID NO: 208 (ceDNA1473).

[0850] SEQ ID NO: 208 includes the following elements. left-ITR_v1, spacer_left-ITR_v2.1, CpGfree20mer_1, 5×HNF1_ProEnh_10mer, BamHI_site, TTR_liver_specific_Promoter, MVM_intron, PmeI_site, Mod_Minimum_Consensus_Kozak, hPAH_codop_ORF_v2, PacI_site, WPRE_3pUTR, bGH, spacer_right-ITR_v1, right-ITR_v1.

[0851] According to some embodiments, the nucleic acid sequence of ceDNA containing codon optimized human PAH version 2 (ceDNA “hPAH_codop_ORF_v2”) with specific cis-elements comprises SEQ ID NO: 208. According to some embodiments, the nucleic acid sequence of ceDNA containing codon optimized human PAH version 2 (ceDNA “hPAH_codop_ORF_v2”) with specific cis-regulatory elements is at least 85% identical to SEQ ID NO: 208. According to some embodiments, the nucleic acid sequence of ceDNA containing codon optimized human PAH version 2 (ceDNA “hPAH_codop_ORF_v2”) with specific cis-regulatory elements is at least 90% identical to SEQ ID NO: 208. According to some embodiments, the nucleic acid sequence of ceDNA containing codon optimized human PAH version 2 (ceDNA “hPAH_codop_ORF_v2”) with specific cis-regulatory elements is at least 91% identical to SEQ ID NO: 2082. According to some embodiments, the nucleic acid sequence of ceDNA containing codon optimized human PAH version 2 (ceDNA “hPAH_codop_ORF_v2”) with specific cis-regulatory elements is at least 92% identical to SEQ ID NO: 208. According to some embodiments, the nucleic acid sequence of ceDNA containing codon optimized human PAH version 2 (ceDNA “hPAH_codop_ORF_v2”) with specific cis-regulatory elements is at least 93% identical to SEQ ID NO: 208. According to some embodiments, the nucleic acid sequence of ceDNA containing codon optimized human PAH version 2 (ceDNA “hPAH_codop_ORF_v2”) with specific cis-regulatory elements is at least 94% identical to SEQ ID NO: 208. According to some embodiments, the nucleic acid sequence of ceDNA containing codon optimized human PAH version 2 (ceDNA “hPAH_codop_ORF_v2”) with specific cis-regulatory elements is at least 95% identical to SEQ ID NO: 208. According to some embodiments, the nucleic acid sequence of ceDNA containing codon optimized human PAH version 2 (ceDNA “hPAH_codop_ORF_v2”) with specific cis-regulatory elements is at least 96% identical to SEQ ID NO: 208. According to some embodiments, the nucleic acid sequence of ceDNA containing codon optimized human PAH version 2 (ceDNA “hPAH_codop_ORF_v2”) with specific cis-regulatory elements is at least 97% identical to SEQ ID NO: 208. According to some embodiments, the nucleic acid sequence of ceDNA containing codon optimized human PAH version 2 (ceDNA “hPAH_codop_ORF_v2”) with specific cis-regulatory elements is at least 98% identical to SEQ ID NO: 208. According to some embodiments, the nucleic acid sequence of ceDNA containing codon optimized human PAH version 2 (ceDNA “hPAH_codop_ORF_v2”) with specific cis-regulatory elements is at least 99% identical to SEQ ID NO: 208. According to some embodiments, the nucleic acid sequence of ceDNA containing codon optimized human PAH version 2 (ceDNA “hPAH_codop_ORF_v2”) with specific cis-regulatory elements consists of SEQ ID NO: 208.

[0852] The nucleic acid sequence of ceDNA containing codon optimized human PAH version 2 (ceDNA “hPAH_codop_ORF_v2”), with specific cis-regulatory elements is shown as SEQ ID NO: 209 (ceDNA1474).

[0853] SEQ ID NO: 209 includes the following elements. left-ITR_v1, spacer_left-ITR_v2.1, CpGfree20mer_1, 5×HNF1_ProEnh_10mer, 3×VanD_TTRe_PromoterSet_v2, PmeI_site, Mod_Minimum_Consensus_Kozak, hPAH_codop_ORF_v2, PacI_site, WPRE_3pUTR, bGH, spacer_right-ITR_v1, right-ITR_v1.

[0854] According to some embodiments, the nucleic acid sequence of ceDNA containing codon optimized human PAH version 2 (ceDNA “hPAH_codop_ORF_v2”) with specific cis-regulatory elements comprises SEQ ID NO: 209. According to some embodiments, the nucleic acid sequence of ceDNA containing codon optimized human PAH version 2 (ceDNA “hPAH_codop_ORF_v2”) with specific cis-regulatory elements is at least 85% identical to SEQ ID NO: 209. According to some embodiments, the nucleic acid sequence of ceDNA containing codon optimized human PAH version 2 (ceDNA “hPAH_codop_ORF_v2”) with specific cis-regulatory elements is at least 90% identical to SEQ ID NO: 209. According to some embodiments, the nucleic acid sequence of ceDNA containing codon optimized human PAH version 2 (ceDNA “hPAH_codop_ORF_v2”) with specific cis-regulatory elements is at least 91% identical to SEQ ID NO: 209. According to some embodiments, the nucleic acid sequence of ceDNA containing codon optimized human PAH version 2 (ceDNA “hPAH_codop_ORF_v2”) with specific cis-regulatory elements is at least 92% identical to SEQ ID NO: 209. According to some embodiments, the nucleic acid sequence of ceDNA containing codon optimized human PAH version 2 (ceDNA “hPAH_codop_ORF_v2”) with specific cis-regulatory elements is at least 93% identical to SEQ ID NO: 209. According to some embodiments, the nucleic acid sequence of ceDNA containing codon optimized human PAH version 2 (ceDNA “hPAH_codop_ORF_v2”) with specific cis-regulatory elements is at least 94% identical to SEQ ID NO: 209. According to some embodiments, the nucleic acid sequence of ceDNA containing codon optimized human PAH version 2 (ceDNA “hPAH_codop_ORF_v2”) with specific cis-regulatory elements is at least 95% identical to SEQ ID NO: 209. According to some embodiments, the nucleic acid sequence of ceDNA containing codon optimized human PAH version 2 (ceDNA “hPAH_codop_ORF_v2”) with specific cis-regulatory elements is at least 96% identical to SEQ ID NO: 209. According to some embodiments, the nucleic acid sequence of ceDNA containing codon optimized human PAH version 2 (ceDNA “hPAH_codop_ORF_v2”) with specific cis-regulatory elements is at least 97% identical to SEQ ID NO: 209. According to some embodiments, the nucleic acid sequence of ceDNA containing codon optimized human PAH version 2 (ceDNA “hPAH_codop_ORF_v2”) with specific cis-regulatory elements is at least 98% identical to SEQ ID NO: 209. According to some embodiments, the nucleic acid sequence of ceDNA containing codon optimized human PAH version 2 (ceDNA “hPAH_codop_ORF_v2”) with specific cis-regulatory elements is at least 99% identical to SEQ ID NO: 209. According to some embodiments, the nucleic acid sequence of ceDNA containing codon optimized human PAH version 2 (ceDNA “hPAH_codop_ORF_v2”) with specific cis-regulatory elements consists of SEQ ID NO: 209.

[0855] The nucleic acid sequence of ceDNA containing codon optimized human PAH version 2 (ceDNA “hPAH_codop_ORF_v2”), with specific cis-regulatory elements is shown as SEQ ID NO: 210 (ceDNA1527).

[0856] SEQ ID NO: 210 includes the following elements. left-ITR_v1, spacer_left-ITR_v2.1, 3×VanD_TTRe_PromoterSet_v2, PmeI_site, Mod_Minimum_Consensus_Kozak, hPAH_codop_ORF_v2, PacI_site, WPRE_3pUTR, bGH, spacer_right-ITR_v1, right-ITR_v1.

[0857] According to some embodiments, the nucleic acid sequence of ceDNA containing codon optimized human PAH version 2 (ceDNA “hPAH_codop_ORF_v2”) with specific cis-regulatory elements comprises SEQ ID NO: 210. According to some embodiments, the nucleic acid sequence of ceDNA containing codon optimized human PAH version 2 (ceDNA “hPAH_codop_ORF_v2”) with specific cis-regulatory elements is at least 85% identical to SEQ ID NO: 210. According to some embodiments, the nucleic acid sequence of ceDNA containing codon optimized human PAH version 2 (ceDNA “hPAH_codop_ORF_v2”) with specific cis-regulatory elements is at least 90% identical to SEQ ID NO: 210. According to some embodiments, the nucleic acid sequence of ceDNA containing codon optimized human PAH version 2 (ceDNA “hPAH_codop_ORF_v2”) with specific cis-regulatory elements is at least 91% identical to SEQ ID NO: 210. According to some embodiments, the nucleic acid sequence of ceDNA containing codon optimized human PAH version 2 (ceDNA “hPAH_codop_ORF_v2”) with specific cis-regulatory elements is at least 92% identical to SEQ ID NO: 210. According to some embodiments, the nucleic acid sequence of ceDNA containing codon optimized human PAH version 2 (ceDNA “hPAH_codop_ORF_v2”) with specific cis-regulatory elements is at least 93% identical to SEQ ID NO: 210. According to some embodiments, the nucleic acid sequence of ceDNA containing codon optimized human PAH version 2 (ceDNA “hPAH_codop_ORF_v2”) with specific cis-regulatory elements is at least 94% identical to SEQ ID NO: 210. According to some embodiments, the nucleic acid sequence of ceDNA containing codon optimized human PAH version 2 (ceDNA “hPAH_codop_ORF_v2”) with specific cis-regulatory elements is at least 95% identical to SEQ ID NO: 210. According to some embodiments, the nucleic acid sequence of ceDNA containing codon optimized human PAH version 2 (ceDNA “hPAH_codop_ORF_v2”) with specific cis-regulatory elements is at least 96% identical to SEQ ID NO: 210. According to some embodiments, the nucleic acid sequence of ceDNA containing codon optimized human PAH version 2 (ceDNA “hPAH_codop_ORF_v2”) with specific cis-regulatory elements is at least 97% identical to SEQ ID NO: 210. According to some embodiments, the nucleic acid sequence of ceDNA containing codon optimized human PAH version 2 (ceDNA “hPAH_codop_ORF_v2”) with specific cis-regulatory elements is at least 98% identical to SEQ ID NO: 210. According to some embodiments, the nucleic acid sequence of ceDNA containing codon optimized human PAH version 2 (ceDNA “hPAH_codop_ORF_v2”) with specific cis-regulatory elements is at least 99% identical to SEQ ID NO: 210. According to some embodiments, the nucleic acid sequence of ceDNA containing codon optimized human PAH version 2 (ceDNA “hPAH_codop_ORF_v2”) with specific cis-regulatory elements consists of SEQ ID NO: 210.

[0858] The nucleic acid sequence of ceDNA containing codon optimized human PAH version 2 (ceDNA “hPAH_codop_ORF_v2”), with specific cis-regulatory elements is shown as SEQ ID NO: 211 (ceDNA1528).

[0859] SEQ ID NO: 211 includes the following elements. left-ITR_v1, spacer_left-ITR_v2.1, CpGmin_hAAT_Promoter_Set, PmeI_site, Mod_Minimum_Consensus_Kozak, hPAH_codop_ORF_v2, PacI_site, WPRE_3pUTR, bGH, spacer_right-ITR_v1, right-ITR_v1.

[0860] According to some embodiments, the nucleic acid sequence of ceDNA containing codon optimized human PAH version 2 (ceDNA “hPAH_codop_ORF_v2”) with specific cis-regulatory elements comprises SEQ ID NO: 211. According to some embodiments, the nucleic acid sequence of ceDNA containing codon optimized human PAH version 2 (ceDNA “hPAH_codop_ORF_v2”) with specific cis-regulatory elements is at least 85% identical to SEQ ID NO: 211. According to some embodiments, the nucleic acid sequence of ceDNA containing codon optimized human PAH version 2 (ceDNA “hPAH_codop_ORF_v2”) with specific cis-regulatory elements is at least 90% identical to SEQ ID NO: 211. According to some embodiments, the nucleic acid sequence of ceDNA containing codon optimized human PAH version 2 (ceDNA “hPAH_codop_ORF_v2”) with specific cis-regulatory elements is at least 91% identical to SEQ ID NO: 211. According to some embodiments, the nucleic acid sequence of ceDNA containing codon optimized human PAH version 2 (ceDNA “hPAH_codop_ORF_v2”) with specific cis-regulatory elements is at least 92% identical to SEQ ID NO: 211. According to some embodiments, the nucleic acid sequence of ceDNA containing codon optimized human PAH version 2 (ceDNA “hPAH_codop_ORF_v2”) with specific cis-regulatory elements is at least 93% identical to SEQ ID NO: 211. According to some embodiments, the nucleic acid sequence of ceDNA containing codon optimized human PAH version 2 (ceDNA “hPAH_codop_ORF_v2”) with specific cis-regulatory elements is at least 94% identical to SEQ ID NO: 211. According to some embodiments, the nucleic acid sequence of ceDNA containing codon optimized human PAH version 2 (ceDNA “hPAH_codop_ORF_v2”) with specific cis-regulatory elements is at least 95% identical to SEQ ID NO: 211. According to some embodiments, the nucleic acid sequence of ceDNA containing codon optimized human PAH version 2 (ceDNA “hPAH_codop_ORF_v2”) with specific cis-regulatory elements is at least 96% identical to SEQ ID NO: 211. According to some embodiments, the nucleic acid sequence of ceDNA containing codon optimized human PAH version 2 (ceDNA “hPAH_codop_ORF_v2”) with specific cis-regulatory elements is at least 97% identical to SEQ ID NO: 211. According to some embodiments, the nucleic acid sequence of ceDNA containing codon optimized human PAH version 2 (ceDNA “hPAH_codop_ORF_v2”) with specific cis-regulatory elements is at least 98% identical to SEQ ID NO: 211. According to some embodiments, the nucleic acid sequence of ceDNA containing codon optimized human PAH version 2 (ceDNA “hPAH_codop_ORF_v2”) with specific cis-regulatory elements is at least 99% identical to SEQ ID NO: 211. According to some embodiments, the nucleic acid sequence of ceDNA containing codon optimized human PAH version 2 (ceDNA “hPAH_codop_ORF_v2”) with specific cis-regulatory elements consists of SEQ ID NO: 211.

[0861] The nucleic acid sequence of ceDNA containing codon optimized human PAH version 2 r3-s34 (ceDNA “hPAH-r3-s34), with specific cis-regulatory elements is shown as SEQ ID NO: 212.(ceDNA1529).

[0862] SEQ ID NO: 212 includes the following elements. left-ITR_v1, spacer_left-ITR_v2, HS-CRM8_SERP_Enhancer_nospacer, HS-CRM8_SERP_Enhancer_nospacer, HS-CRM8_SERP_Enhancer_nospacer, BamHI_site, TTR-promoter-d5pUTR, MVM_intron, PmeI_site, Mod_Minimum_Consensus_Kozak, hPAH-r3-s34, PacI_site, WPRE_3pUTR, bGH, spacer_right-ITR_v1, right-ITR_v1.

[0863] According to some embodiments, the nucleic acid sequence of ceDNA containing codon optimized human PAH version 2 r3-s34 (ceDNA “hPAH-r3-s34”) with specific cis-regulatory elements comprises SEQ ID NO: 212. According to some embodiments, the nucleic acid sequence of ceDNA containing codon optimized human PAH version 2 r3-s34 (ceDNA “hPAH-r3-s34”) with specific cis-regulatory elements is at least 85% identical to SEQ ID NO: 212. According to some embodiments, the nucleic acid sequence of ceDNA containing codon optimized human PAH version 2 r3-s34 (ceDNA “hPAH-r3-s34”) with specific cis-regulatory elements is at least 90% identical to SEQ ID NO: 212. According to some embodiments, the nucleic acid sequence of ceDNA containing codon optimized human PAH version 2 r3-s34 (ceDNA “hPAH-r3-s34”) with specific cis-regulatory elements is at least 91% identical to SEQ ID NO: 212. According to some embodiments, the nucleic acid sequence of ceDNA containing codon optimized human PAH version 2 r3-s34 (ceDNA “hPAH-r3-s34”) with specific cis-regulatory elements is at least 92% identical to SEQ ID NO: 212. According to some embodiments, the nucleic acid sequence of ceDNA containing codon optimized human PAH version 2 r3-s34 (ceDNA “hPAH-r3-s34”) with specific cis-regulatory elements is at least 93% identical to SEQ ID NO: 212. According to some embodiments, the nucleic acid sequence of ceDNA containing codon optimized human PAH version 2 r3-s34 (ceDNA “hPAH-r3-s34”) with specific cis-regulatory elements is at least 94% identical to SEQ ID NO: 212. According to some embodiments, the nucleic acid sequence of ceDNA containing codon optimized human PAH version 2 r5-s29 (ceDNA “hPAH-r3-s34”) with specific cis-regulatory elements is at least 95% identical to SEQ ID NO: 212. According to some embodiments, the nucleic acid sequence of ceDNA containing codon optimized human PAH version 2 r3-s34 (ceDNA “hPAH-r3-s34”) with specific cis-regulatory elements is at least 96% identical to SEQ ID NO: 212. According to some embodiments, the nucleic acid sequence of ceDNA containing codon optimized human PAH version 2 r3-s34 (ceDNA “hPAH-r3-s34”) with specific cis-regulatory elements is at least 97% identical to SEQ ID NO: 212. According to some embodiments, the nucleic acid sequence of ceDNA containing codon optimized human PAH version 2 r3-s34 (ceDNA “hPAH-r3-s34”) with specific cis-regulatory elements is at least 98% identical to SEQ ID NO: 212. According to some embodiments, the nucleic acid sequence of ceDNA containing codon optimized human PAH version 2 r3-s34 (ceDNA “hPAH-r3-s34”) with specific cis-regulatory elements is at least 99% identical to SEQ ID NO: 212. According to some embodiments, the nucleic acid sequence of ceDNA containing codon optimized human PAH version 2 r3-s34 (ceDNA “hPAH-r3-s34”) with specific cis-regulatory elements consists of SEQ ID NO: 212.

[0864] The nucleic acid sequence of ceDNA containing codon optimized human PAH version 2 r5-s29 (ceDNA “hPAH-r5-s29”), with specific cis-regulatory elements is shown as SEQ ID NO: 213 (ceDNA1530).

[0865] SEQ ID NO: 213 includes the following elements: left-ITR_v1, spacer_left-ITR_v2, HS-CRM8_SERP_Enhancer_nospacer, HS-CRM8_SERP_Enhancer_nospacer, HS-CRM8_SERP_Enhancer_nospacer, BamHI_site, TTR-promoter-d5pUTR, MVM_intron, PmeI_site, Mod_Minimum_Consensus_Kozak, hPAH-r5-s29, PacI_site, WPRE_3pUTR, bGH, spacer_right-ITR_v1, right-ITR_v1.

[0866] According to some embodiments, the nucleic acid sequence of ceDNA containing codon optimized human PAH version 2 r5-s29 (ceDNA “hPAH-r5-s29”) with specific cis-regulatory elements comprises SEQ ID NO: 213. According to some embodiments, the nucleic acid sequence of ceDNA containing codon optimized human PAH version 2 r5-s29 (ceDNA “hPAH-r5-s29”) with specific cis-regulatory elements is at least 85% identical to SEQ ID NO: 213. According to some embodiments, the nucleic acid sequence of ceDNA containing codon optimized human PAH version 2 r5-s29 (ceDNA “hPAH-r5-s29”) with specific cis-regulatory elements is at least 90% identical to SEQ ID NO: 213. According to some embodiments, the nucleic acid sequence of ceDNA containing codon optimized human PAH version 2 r5-s29 (ceDNA “hPAH-r5-s29”) with specific cis-regulatory elements is at least 91% identical to SEQ ID NO: 213. According to some embodiments, the nucleic acid sequence of ceDNA containing codon optimized human PAH version 2 r5-s29 (ceDNA “hPAH-r5-s29”) with specific cis-regulatory elements is at least 92% identical to SEQ ID NO: 213. According to some embodiments, the nucleic acid sequence of ceDNA containing codon optimized human PAH version 2 r5-s29 (ceDNA “hPAH-r5-s29”) with specific cis-regulatory elements is at least 93% identical to SEQ ID NO: 213. According to some embodiments, the nucleic acid sequence of ceDNA containing codon optimized human PAH version 2 r5-s29 (ceDNA “hPAH-r5-s29”) with specific cis-regulatory elements is at least 94% identical to SEQ ID NO: 213. According to some embodiments, the nucleic acid sequence of ceDNA containing codon optimized human PAH version 2 r5-s29 (ceDNA “hPAH-r5-s29”) with specific cis-regulatory elements is at least 95% identical to SEQ ID NO: 213. According to some embodiments, the nucleic acid sequence of ceDNA containing codon optimized human PAH version 2 r5-s29 (ceDNA “hPAH-r5-s29”) with specific cis-regulatory elements is at least 96% identical to SEQ ID NO: 213. According to some embodiments, the nucleic acid sequence of ceDNA containing codon optimized human PAH version 2 r5-s29 (ceDNA “hPAH-r5-s29”) with specific cis-regulatory elements is at least 97% identical to SEQ ID NO: 213. According to some embodiments, the nucleic acid sequence of ceDNA containing codon optimized human PAH version 2 r5-s29 (ceDNA “hPAH-r5-s29”) with specific cis-regulatory elements is at least 98% identical to SEQ ID NO: 213. According to some embodiments, the nucleic acid sequence of ceDNA containing codon optimized human PAH version 2 r5-s29 (ceDNA “hPAH-r5-s29”) with specific cis-regulatory elements is at least 99% identical to SEQ ID NO: 213. According to some embodiments, the nucleic acid sequence of ceDNA containing codon optimized human PAH version 2 r5-s29 (ceDNA “hPAH-r5-s29”) with specific cis-regulatory elements consists of SEQ ID NO: 213.

[0867] Additional full-length ceDNA PAH construct sequences are set forth in Table 35. In some embodiments, the nucleic acid sequence of the full-length ceDNA PAH construct sequence is at least 90% identical to any sequence set forth in Table 35. In some embodiments, the nucleic acid sequence of the full-length ceDNA PAH construct sequence is at least 95% identical to any sequence set forth in Table 35. In some embodiments, the nucleic acid sequence of the full-length ceDNA PAH construct sequence is at least 96% identical to any sequence set forth in Table 35. In some embodiments, the nucleic acid sequence of the full-length ceDNA PAH construct sequence is at least 97% identical to any sequence set forth in Table 35. In some embodiments, the nucleic acid sequence of the full-length ceDNA PAH construct sequence is at least 98% identical to any sequence set forth in Table 35. In some embodiments, the nucleic acid sequence of the full-length ceDNA PAH construct sequence is at least 99% identical to any sequence set forth in Table 35. In some embodiments, the nucleic acid sequence of the full-length ceDNA PAH construct sequence comprises any sequence set forth in Table 35. In some embodiments, the nucleic acid sequence of the full-length ceDNA PAH construct sequence consists of any sequence set forth in Table 35.

TABLE 35
Additonal Full-length ceDNA
PAH Construct Sequences

| | Sequence |
|---|---|
| Registry ID | Identifier |
| ceDNA1137 | 541 |
| ceDNA1146 | 542 |
| ceDNA1279 | 543 |
| ceDNA1285 | 544 |
| ceDNA1475 | 545 |
| ceDNA1476 | 546 |
| ceDNA1477 | 547 |
| ceDNA1478 | 548 |
| ceDNA1479 | 549 |
| ceDNA1480 | 550 |
| ceDNA1497 | 551 |
| ceDNA1498 | 552 |
| ceDNA1499 | 553 |
| ceDNA1500 | 554 |
| ceDNA1501 | 555 |
| ceDNA1502 | 556 |
| ceDNA1503 | 557 |
| ceDNA1504 | 558 |
| ceDNA1505 | 559 |
| ceDNA1531 | 560 |
| ceDNA1532 | 561 |
| ceDNA1939 | 562 |
| ceDNA1940 | 563 |
| ceDNA1941 | 564 |
| ceDNA1942 | 565 |
| ceDNA1943 | 566 |
| ceDNA1945 | 567 |
| ceDNA1955 | 568 |
| ceDNA62 | 569 |
| ceDNA2409 | 570 |
| ceDNA2410 | 571 |
| ceDNA2415 | 572 |
| ceDNA2418 | 573 |
| ceDNA2416 | 574 |
| ceDNA2419 | 575 |
| ceDNA2420 | 576 |
| ceDNA34 | 577 |
| ceDNA35 | 578 |
| ceDNA36 | 579 |
| ceDNA37 | 580 |
| ceDNA41 | 581 |
| ceDNA42 | 582 |
| ceDNA43 | 583 |
| ceDNA44 | 584 |

### REFERENCES

[0868] All publications and references, including but not limited to patents and patent applications, cited in this specification and Examples herein are incorporated by reference in their entirety as if each individual publication or reference were specifically and individually indicated to be incorporated by reference herein as being fully set forth. Any patent application to which this application claims priority is also incorporated by reference herein in the manner described above for publications and references.

The application's sequence listing, which the Patent Office published only in electronic form, follows.

SEQUENCE LISTING (1026 sequences)

SEQ ID NO: 1 - DNA, 141 bp, Adeno-associated virus 2
aggaacccctagtgatggagttggccactccctctctgcgcgctcgctcgctcactgaggccgggcgaccaaaggtcgcccgacgcccgggctttgcccgggcggcctcagtgagcgagcgagcgcgcagctgcctgcagg

SEQ ID NO: 2 - DNA, 141 bp, Adeno-associated virus 2
cctgcaggcagctgcgcgctcgctcgctcactgaggccgcccgggcaaagcccgggcgtcgggcgacctttggtcgcccggcctcagtgagcgagcgagcgcgcagagagggagtggccaactccatcactaggggttcct

SEQ ID NO: 3-4 - skipped (2 entries)

SEQ ID NO: 5 - DNA, 143 bp, Adeno-associated virus 1
ttgcccactccctctctgcgcgctcgctcgctcggtggggcctgcggaccaaaggtccgcagacggcagaggtctcctctgccggccccaccgagcgagcgacgcgcgcagagagggagtgggcaactccatcactagggtaa

SEQ ID NO: 6 - DNA, 144 bp, Adeno-associated virus 3
ttggccactccctctatgcgcactcgctcgctcggtggggcctggcgaccaaaggtcgccagacggacgtgggtttccacgtccggccccaccgagcgagcgagtgcgcatagagggagtggccaactccatcactagaggtat

SEQ ID NO: 7 - DNA, 127 bp, Adeno-associated virus 4
ttggccactccctctatgcgcgctcgctcactcactcggccctggagaccaaaggtctccagactgccggcctctggccggcagggccgagtgagtgagcgagcgcgcatagagggagtggccaact

SEQ ID NO: 8 - DNA, 166 bp, Adeno-associated virus 5
tcccccctgtcgcgttcgctcgctcgctggctcgtttgggggggcgacggccagagggccgtcgtctggcagctctttgagctgccacccccccaaacgagccagcgagcgagcgaacgcgacaggggggagagtgccacactctcaagcaagggggttttgtaag

SEQ ID NO: 9 - DNA, 144 bp, Adeno-associated virus 6
ttgcccactccctctaatgcgcgctcgctcgctcggtggggcctgcggaccaaaggtccgcagacggcagaggtctcctctgccggccccaccgagcgagcgagcgcgcatagagggagtgggcaactccatcactaggggtat

SEQ ID NO: 10 - DNA, 143 bp, Adeno-associated virus 1
ttaccctagtgatggagttgcccactccctctctgcgcgcgtcgctcgctcggtggggccggcagaggagacctctgccgtctgcggacctttggtccgcaggccccaccgagcgagcgagcgcgcagagagggagtgggcaa

SEQ ID NO: 11 - DNA, 144 bp, Adeno-associated virus 3
atacctctagtgatggagttggccactccctctatgcgcactcgctcgctcggtggggccggacgtggaaacccacgtccgtctggcgacctttggtcgccaggccccaccgagcgagcgagtgcgcatagagggagtggccaa

SEQ ID NO: 12 - DNA, 127 bp, Adeno-associated virus 4
agttggccacattagctatgcgcgctcgctcactcactcggccctggagaccaaaggtctccagactgccggcctctggccggcagggccgagtgagtgagcgagcgcgcatagagggagtggccaa

SEQ ID NO: 13 - DNA, 166 bp, Adeno-associated virus 5
cttacaaaacccccttgcttgagagtgtggcactctcccccctgtcgcgttcgctcgctcgctggctcgtttgggggggtggcagctcaaagagctgccagacgacggccctctggccgtcgcccccccaaacgagccagcgagcgagcgaacgcgacagggggga

SEQ ID NO: 14 - DNA, 144 bp, Adeno-associated virus 6
atacccctagtgatggagttgcccactccctctatgcgcgctcgctcgctcggtggggccggcagaggagacctctgccgtctgcggacctttggtccgcaggccccaccgagcgagcgagcgcgcattagagggagtgggcaa

SEQ ID NO: 15 - DNA, 120 bp, Artificial Sequence
  Description of Artificial Sequence: Synthetic polynucleotide
aggaacccctagtgatggagttggccactccctctctgcgcgctcgctcgctcactgaggcgcacgcccgggtttcccgggcggcctcagtgagcgagcgagcgcgcagctgcctgcagg

SEQ ID NO: 16 - DNA, 122 bp, Artificial Sequence
  Description of Artificial Sequence: Synthetic polynucleotide
aggaacccctagtgatggagttggccactccctctctgcgcgctcgctcgctcactgaggccgacgcccgggctttgcccgggcggcctcagtgagcgagcgagcgcgcagctgcctgcagg

SEQ ID NO: 17 - DNA, 129 bp, Artificial Sequence
  Description of Artificial Sequence: Synthetic polynucleotide
aggaacccctagtgatggagttggccactccctctctgcgcgctcgctcgctcactgaggccgggcgaccaaaggtcgcccgacgcccgggcgcctcagtgagcgagcgagcgcgcagctgcctgcagg

SEQ ID NO: 18 - DNA, 101 bp, Artificial Sequence
  Description of Artificial Sequence: Synthetic polynucleotide
aggaacccctagtgatggagttggccactccctctctgcgcgctcgctcgctcactgaggctttgcctcagtgagcgagcgagcgcgcagctgcctgcagg

SEQ ID NO: 19 - DNA, 139 bp, Artificial Sequence
  Description of Artificial Sequence: Synthetic polynucleotide
aggaacccctagtgatggagttggccactccctctctgcgcgctcgctcgctcactgaggccgggcgacaaagtcgcccgacgcccgggctttgcccgggcggcctcagtgagcgagcgagcgcgcagctgcctgcagg

SEQ ID NO: 20 - DNA, 137 bp, Artificial Sequence
  Description of Artificial Sequence: Synthetic polynucleotide
aggaacccctagtgatggagttggccactccctctctgcgcgctcgctcgctcactgaggccgggcgaaaatcgcccgacgcccgggctttgcccgggcggcctcagtgagcgagcgagcgcgcagctgcctgcagg

SEQ ID NO: 21 - DNA, 135 bp, Artificial Sequence
  Description of Artificial Sequence: Synthetic polynucleotide
aggaacccctagtgatggagttggccactccctctctgcgcgctcgctcgctcactgaggccgggcgaaacgcccgacgcccgggctttgcccgggcggcctcagtgagcgagcgagcgcgcagctgcctgcagg

SEQ ID NO: 22 - DNA, 133 bp, Artificial Sequence
  Description of Artificial Sequence: Synthetic polynucleotide
aggaacccctagtgatggagttggccactccctctctgcgcgctcgctcgctcactgaggccgggcaaagcccgacgcccgggctttgcccgggcggcctcagtgagcgagcgagcgcgcagctgcctgcagg

SEQ ID NO: 23 - DNA, 139 bp, Artificial Sequence
  Description of Artificial Sequence: Synthetic polynucleotide
aggaacccctagtgatggagttggccactccctctctgcgcgctcgctcgctcactgaggccgggcgaccaaaggtcgcccgacgcccgggtttcccgggcggcctcagtgagcgagcgagcgcgcagctgcctgcagg

SEQ ID NO: 24 - DNA, 137 bp, Artificial Sequence
  Description of Artificial Sequence: Synthetic polynucleotide
aggaacccctagtgatggagttggccactccctctctgcgcgctcgctcgctcactgaggccgggcgaccaaaggtcgcccgacgcccggtttccgggcggcctcagtgagcgagcgagcgcgcagctgcctgcagg

SEQ ID NO: 25 - DNA, 135 bp, Artificial Sequence
  Description of Artificial Sequence: Synthetic polynucleotide
aggaacccctagtgatggagttggccactccctctctgcgcgctcgctcgctcactgaggccgggcgaccaaaggtcgcccgacgcccgtttcgggcggcctcagtgagcgagcgagcgcgcagctgcctgcagg

SEQ ID NO: 26 - DNA, 133 bp, Artificial Sequence
  Description of Artificial Sequence: Synthetic polynucleotide
aggaacccctagtgatggagttggccactccctctctgcgcgctcgctcgctcactgaggccgggcgaccaaaggtcgcccgacgccctttgggcggcctcagtgagcgagcgagcgcgcagctgcctgcagg

SEQ ID NO: 27 - DNA, 131 bp, Artificial Sequence
  Description of Artificial Sequence: Synthetic polynucleotide
aggaacccctagtgatggagttggccactccctctctgcgcgctcgctcgctcactgaggccgggcgaccaaaggtcgcccgacgcctttggcggcctcagtgagcgagcgagcgcgcagctgcctgcagg

SEQ ID NO: 28 - DNA, 129 bp, Artificial Sequence
  Description of Artificial Sequence: Synthetic polynucleotide
aggaacccctagtgatggagttggccactccctctctgcgcgctcgctcgctcactgaggccgggcgaccaaaggtcgcccgacgctttgcggcctcagtgagcgagcgagcgcgcagctgcctgcagg

SEQ ID NO: 29 - DNA, 127 bp, Artificial Sequence
  Description of Artificial Sequence: Synthetic polynucleotide
aggaacccctagtgatggagttggccactccctctctgcgcgctcgctcgctcactgaggccgggcgaccaaaggtcgcccgacgtttcggcctcagtgagcgagcgagcgcgcagctgcctgcagg

SEQ ID NO: 30 - DNA, 122 bp, Artificial Sequence
  Description of Artificial Sequence: Synthetic polynucleotide
aggaacccctagtgatggagttggccactccctctctgcgcgctcgctcgctcactgaggccgggcgaccaaaggtcgcccgacggcctcagtgagcgagcgagcgcgcagctgcctgcagg

SEQ ID NO: 31 - DNA, 130 bp, Artificial Sequence
  Description of Artificial Sequence: Synthetic polynucleotide
aggaacccctagtgatggagttggccactccctctctgcgcgctcgctcgctcactgaggccgggcgaccaaaggtcgcccgacgcccgggcggcctcagtgagcgagcgagcgcgcagctgcctgcagg

SEQ ID NO: 32 - DNA, 120 bp, Artificial Sequence
  Description of Artificial Sequence: Synthetic polynucleotide
cctgcaggcagctgcgcgctcgctcgctcactgaggccgcccgggaaacccgggcgtgcgcctcagtgagcgagcgagcgcgcagagagggagtggccaactccatcactaggggttcct

SEQ ID NO: 33 - DNA, 122 bp, Artificial Sequence
  Description of Artificial Sequence: Synthetic polynucleotide
cctgcaggcagctgcgcgctcgctcgctcactgaggccgtcgggcgacctttggtcgcccggcctcagtgagcgagcgagcgcgcagagagggagtggccaactccatcactaggggttcct

SEQ ID NO: 34 - DNA, 122 bp, Artificial Sequence
  Description of Artificial Sequence: Synthetic polynucleotide
cctgcaggcagctgcgcgctcgctcgctcactgaggccgcccgggcaaagcccgggcgtcggcctcagtgagcgagcgagcgcgcagagagggagtggccaactccatcactaggggttcct

SEQ ID NO: 35 - DNA, 129 bp, Artificial Sequence
  Description of Artificial Sequence: Synthetic polynucleotide
cctgcaggcagctgcgcgctcgctcgctcactgaggcgcccgggcgtcgggcgacctttggtcgcccggcctcagtgagcgagcgagcgcgcagagagggagtggccaactccatcactaggggttcct

SEQ ID NO: 36 - DNA, 101 bp, Artificial Sequence
  Description of Artificial Sequence: Synthetic polynucleotide
cctgcaggcagctgcgcgctcgctcgctcactgaggcaaagcctcagtgagcgagcgagcgcgcagagagggagtggccaactccatcactaggggttcct

SEQ ID NO: 37 - DNA, 139 bp, Artificial Sequence
  Description of Artificial Sequence: Synthetic polynucleotide
cctgcaggcagctgcgcgctcgctcgctcactgaggccgcccgggcaaagcccgggcgtcgggcgactttgtcgcccggcctcagtgagcgagcgagcgcgcagagagggagtggccaactccatcactaggggttcct

SEQ ID NO: 38 - DNA, 137 bp, Artificial Sequence
  Description of Artificial Sequence: Synthetic polynucleotide
cctgcaggcagctgcgcgctcgctcgctcactgaggccgcccgggcaaagcccgggcgtcgggcgattttcgcccggcctcagtgagcgagcgagcgcgcagagagggagtggccaactccatcactaggggttcct

SEQ ID NO: 39 - DNA, 135 bp, Artificial Sequence
  Description of Artificial Sequence: Synthetic polynucleotide
cctgcaggcagctgcgcgctcgctcgctcactgaggccgcccgggcaaagcccgggcgtcgggcgtttcgcccggcctcagtgagcgagcgagcgcgcagagagggagtggccaactccatcactaggggttcct

SEQ ID NO: 40 - DNA, 133 bp, Artificial Sequence
  Description of Artificial Sequence: Synthetic polynucleotide
cctgcaggcagctgcgcgctcgctcgctcactgaggccgcccgggcaaagcccgggcgtcgggctttgcccggcctcagtgagcgagcgagcgcgcagagagggagtggccaactccatcactaggggttcct

SEQ ID NO: 41 - DNA, 139 bp, Artificial Sequence
  Description of Artificial Sequence: Synthetic polynucleotide
cctgcaggcagctgcgcgctcgctcgctcactgaggccgcccgggaaacccgggcgtcgggcgacctttggtcgcccggcctcagtgagcgagcgagcgcgcagagagggagtggccaactccatcactaggggttcct

SEQ ID NO: 42 - DNA, 137 bp, Artificial Sequence
  Description of Artificial Sequence: Synthetic polynucleotide
cctgcaggcagctgcgcgctcgctcgctcactgaggccgcccggaaaccgggcgtcgggcgacctttggtcgcccggcctcagtgagcgagcgagcgcgcagagagggagtggccaactccatcactaggggttcct

SEQ ID NO: 43 - DNA, 135 bp, Artificial Sequence
  Description of Artificial Sequence: Synthetic polynucleotide
cctgcaggcagctgcgcgctcgctcgctcactgaggccgcccgaaacgggcgtcgggcgacctttggtcgcccggcctcagtgagcgagcgagcgcgcagagagggagtggccaactccatcactaggggttcct

SEQ ID NO: 44 - DNA, 133 bp, Artificial Sequence
  Description of Artificial Sequence: Synthetic polynucleotide
cctgcaggcagctgcgcgctcgctcgctcactgaggccgcccaaagggcgtcgggcgacctttggtcgcccggcctcagtgagcgagcgagcgcgcagagagggagtggccaactccatcactaggggttcct

SEQ ID NO: 45 - DNA, 131 bp, Artificial Sequence
  Description of Artificial Sequence: Synthetic polynucleotide
cctgcaggcagctgcgcgctcgctcgctcactgaggccgccaaaggcgtcgggcgacctttggtcgcccggcctcagtgagcgagcgagcgcgcagagagggagtggccaactccatcactaggggttcct

SEQ ID NO: 46 - DNA, 129 bp, Artificial Sequence
  Description of Artificial Sequence: Synthetic polynucleotide
cctgcaggcagctgcgcgctcgctcgctcactgaggccgcaaagcgtcgggcgacctttggtcgcccggcctcagtgagcgagcgagcgcgcagagagggagtggccaactccatcactaggggttcct

SEQ ID NO: 47 - DNA, 127 bp, Artificial Sequence
  Description of Artificial Sequence: Synthetic polynucleotide
cctgcaggcagctgcgcgctcgctcgctcactgaggccgaaacgtcgggcgacctttggtcgcccggcctcagtgagcgagcgagcgcgcagagagggagtggccaactccatcactaggggttcct

SEQ ID NO: 48 - DNA, 122 bp, Artificial Sequence; identical to SEQ ID NO: 30
  Description of Artificial Sequence: Synthetic polynucleotide

SEQ ID NO: 49 - DNA, 12 bp, Artificial Sequence
  Description of Artificial Sequence: Synthetic oligonucleotide
cgatcgttcgat

SEQ ID NO: 50 - DNA, 12 bp, Artificial Sequence
  Description of Artificial Sequence: Synthetic oligonucleotide
atcgaaccatcg

SEQ ID NO: 51 - DNA, 12 bp, Artificial Sequence
  Description of Artificial Sequence: Synthetic oligonucleotide
atcgaacgatcg

SEQ ID NO: 52 - DNA, 165 bp, Adeno-associated virus 2
aggaacccctagtgatggagttggccactccctctctgcgcgctcgctcgctcactgaggccgcccgggcaaagcccgggcgtcgggcgacctttggtcgcccggcctcagtgagcgagcgagcgcgcagagagggagtggccaactccatcactaggggttcct

SEQ ID NO: 53 - DNA, 140 bp, Adeno-associated virus 2
cccctagtgatggagttggccactccctctctgcgcgctcgctcgctcactgaggccgcccgggcaaagcccgggcgtcgggcgacctttggtcgcccggcctcagtgagcgagcgagcgcgcagagagatcactagggg

SEQ ID NO: 54 - DNA, 90 bp, Adeno-associated virus 2
gcgcgctcgctcgctcactgaggccgcccgggcaaagcccgggcgtcgggcgacctttggtcgcccggcctcagtgagcgagcgagcgcg

SEQ ID NO: 55 - DNA, 91 bp, Adeno-associated virus 2
gcgcgctcgctcgctcactgaggccgggcgaccaaaggtcgcccgacgcccgggctttgcccgggcggcctcagtgagcgagcgagcgcgc

SEQ ID NO: 56-59 - skipped (4 entries)

SEQ ID NO: 60 - DNA, 16 bp, Adeno-associated virus 2
gcgcgctcgctcgctc

SEQ ID NO: 61 - DNA, 6 bp, Adeno-associated virus 2
ggttga

SEQ ID NO: 62 - DNA, 4 bp, Unknown
  Description of Unknown: TRS sequence
agtt

SEQ ID NO: 63 - DNA, 6 bp, Unknown
  Description of Unknown: TRS sequence
ggttgg

SEQ ID NO: 64 - DNA, 6 bp, Unknown
  Description of Unknown: TRS sequence
agttgg

SEQ ID NO: 65 - DNA, 6 bp, Unknown
  Description of Unknown: TRS sequence
agttga

SEQ ID NO: 66 - DNA, 6 bp, Unknown
  Description of Unknown: TRS sequence
rrttrr

SEQ ID NO: 67-68 - skipped (2 entries)

SEQ ID NO: 69 - DNA, 8 bp, Artificial Sequence
  Description of Artificial Sequence: Synthetic oligonucleotide
actgaggc

SEQ ID NO: 70 - DNA, 8 bp, Artificial Sequence
  Description of Artificial Sequence: Synthetic oligonucleotide
gcctcagt

SEQ ID NO: 71 - DNA, 16 bp, Adeno-associated virus 2
gagcgagcgagcgcgc

SEQ ID NO: 72-89 - skipped (18 entries)

SEQ ID NO: 90 - protein, 7 aa, Simian virus 40
PKKKRKV

SEQ ID NO: 91 - DNA, 21 bp, Simian virus 40
cccaagaagaagaggaaggtg

SEQ ID NO: 92 - protein, 16 aa, Unknown
  Description of Unknown: Nucleoplasmin peptide
KRPAATKKAGQAKKKK

SEQ ID NO: 93 - protein, 9 aa, Unknown
  Description of Unknown: c-myc peptide
PAAKRVKLD

SEQ ID NO: 94 - protein, 11 aa, Unknown
  Description of Unknown: c-myc peptide
RQRRNELKRSP

SEQ ID NO: 95 - protein, 38 aa, Homo sapiens
NQSSNFGPMKGGNFGGRSSGPYGGGGQYFAKPRNQGGY

SEQ ID NO: 96 - protein, 42 aa, Unknown
  Description of Unknown: IBB domain from importin-alpha polypeptide
RMRIZFKNKGKDTAELRRRRVEVSVELRKAKKDEQILKRRNV

SEQ ID NO: 97 - protein, 8 aa, Unknown
  Description of Unknown: myoma T protein peptide
VSRKRPRP

SEQ ID NO: 98 - protein, 8 aa, Unknown
  Description of Unknown: myoma T protein peptide
PPKKARED

SEQ ID NO: 99 - protein, 8 aa, Homo sapiens
PQPKKKPL

SEQ ID NO: 100 - protein, 12 aa, Mus sp.
SALIKKKKKMAP

SEQ ID NO: 101-112 - skipped (12 entries)

SEQ ID NO: 113 - DNA, 79 bp, Artificial Sequence
  Description of Artificial Sequence: Synthetic oligonucleotide
gcgcgctcgctcgctcactgaggccgcccgggcgtcgggcgacctttggtcgcccggcctcagtgagcgagcgagcgcg

SEQ ID NO: 114 - DNA, 80 bp, Artificial Sequence
  Description of Artificial Sequence: Synthetic oligonucleotide
gcgcgctcgctcgctcactgaggccgggcgaccaaaggtcgcccgacgcccgggcggcctcagtgagcgagcgagcgcgc

SEQ ID NO: 115-116 - skipped (2 entries)

SEQ ID NO: 117 - protein, 5 aa, Influenza virus
DRLRR

SEQ ID NO: 118 - protein, 7 aa, Influenza virus
PKQKKRK

SEQ ID NO: 119 - protein, 10 aa, Hepatitis virus
RKLKKKIKKL

SEQ ID NO: 120 - protein, 10 aa, Mus sp.
REKKKFLKRR

SEQ ID NO: 121 - protein, 20 aa, Homo sapiens
KRKGDEVDGVDEVAKKKSKK

SEQ ID NO: 122 - protein, 17 aa, Homo sapiens
RKCLQAGMNLEARKTKK

SEQ ID NO: 123-190 - skipped (68 entries)

SEQ ID NO: 191 - DNA, 225 bp, Artificial Sequence
  Description of Artificial Sequence: Synthetic polynucleotide
ccgtctgtctgcacatttcgtagagcgagtgttccgatactctaatctccctaggcaaggttcatatttgtgtaggttacttattctccttttgttgactaagtcaataatcagaatcagcaggtttggagtcagcttggcagggatcagcagcctgggttggaaggagggggtataaaagccccttcaccaggagaagccgtcacacagatccacaagctcctg

SEQ ID NO: 192 - DNA, 7551 bp, Artificial Sequence
  Description of Artificial Sequence: Synthetic polynucleotide
aaagtagccgaagatgacggtttgtcacatggagttggcaggatgtttgattaaaaacataacaggaagaaaaatgccccgctgtgggcggacaaaatagttgggaactgggaggggtggaaatggagtttttaaggattatttagggaagagtgacaaaatagatgggaactgggtgtagcgtcgtaagctaatacgaaaattaaaaatgacaaaatagtttggaactagatttcacttatctggttcggatctcctaggcctgcaggcagctgcgcgctcgctcgctcactgaggccgcccgggcaaagcccgggcgtcgggcgacctttggtcgcccggcctcagtgagcgagcgagcgcgcagagagggagtggccaactccatcactaggggttccttgtagttaatgattaacccgccatgctacttatcgcggccgccgggggaggctgctggtgaatattaaccaaggtcaccccagttatcggaggagcaaacaggggctaagtccacacgcgtggtaccgtctgtctgcacatttcgtagagcgagtgttccgatactctaatctccctaggcaaggttcatatttgtgtaggttacttattctccttttgttgactaagtcaataatcagaatcagcaggtttggagtcagcttggcagggatcagcagcctgggttggaaggagggggtataaaagccccttcaccaggagaagccgtcacacagatccacaagctcctgaagaggtaagggtttaagggatggttggttggtggggtattaatgtttaattacctggagcacctgcctgaaatcactttttttcaggttggtttaaaccgcagccaccatgagcaccgccgtgctggaaaatcctggcctgggcagaaagctgagcgacttcggccaagagacaagctacatcgaggacaactgcaaccagaacggcgccatcagcctgatcttcagcctgaaagaagaagtgggcgccctggccaaggtgctgagactgttcgaagagaacgacgtgaacctgacacacatcgagagcagacccagcagactgaagaaggacgagtacgagttcttcacccacctggacaagcggagcctgcctgctctgaccaacatcatcaagatcctgcggcacgacatcggcgccacagtgcacgaactgagccgggacaagaaaaaggacaccgtgccatggttccccagaaccatccaagagctggacagattcgccaaccagatcctgagctatggcgccgagctggacgctgatcaccctggctttaaggaccccgtgtaccgggccagaagaaagcagtttgccgatatcgcctacaactaccggcacggccagcctattcctcgggtcgagtacatggaagaggaaaagaaaacctggggcaccgtgttcaagaccctgaagtccctgtacaagacccacgcctgctacgagtacaaccacatcttcccactgctcgaaaagtactgcggcttccacgaggacaatatccctcagcttgaggacgtgtcccagttcctgcagacctgcaccggctttagactgaggccagttgccggactgctgagcagcagagattttctcggcggcctggccttcagagtgttccactgtacccagtacatcagacacggcagcaagcccatgtacacccctgagcctgatatctgccacgagctgctgggacatgtgcccctgttcagcgatagaagcttcgcccagttcagccaagagatcggactggcttctctgggagcccctgacgagtacattgagaagctggccaccatctactggttcaccgtggaattcggcctgtgcaagcagggcgacagcatcaaagcttatggcgctggcctgctgtctagcttcggcgagctgcagtactgtctgagcgagaagcctaagctgctgcccctggaactggaaaagaccgccatccagaactacaccgtgaccgagttccagcctctgtactacgtggccgagagcttcaacgacgccaaagaaaaagtgcggaacttcgccgccaccattcctcggcctttcagcgtcagatacgacccctacacacagcggatcgaggtgctggacaacacacagcagctgaaaattctggccgactccatcaacagcgagatcggcatcctgtgcagcgccctgcagaaaatcaagtgatagttaattaagagcatcttaccgccatttattcccatatttgttctgtttttcttgatttgggtatacatttaaatgttaataaaacaaaatggtggggcaatcatttacatttttagggatatgtaattactagttcaggtgtattgccacaagacaaacatgttaagaaactttcccgttatttacgctctgttcctgttaatcaacctctggattacaaaatttgtgaaagattgactgatattcttaactatgttgctccttttacgctgtgtggatatgctgctttatagcctctgtatctagctattgcttcccgtacggctttcgttttctcctccttgtataaatcctggttgctgtctcttttagaggagttgtggcccgttgtccgtcaacgtggcgtggtgtgctctgtgtttgctgacgcaacccccactggctggggcattgccaccacctgtcaactcctttctgggactttcgctttccccctcccgatcgccacggcagaactcatcgccgcctgccttgcccgctgctggacaggggctaggttgctgggcactgataattccgtggtgttgtctgtgccttctagttgccagccatctgttgtttgcccctcccccgtgccttccttgaccctggaaggtgccactcccactgtcctttcctaataaaatgaggaaattgcatcgcattgtctgagtaggtgtcattctattctggggggtggggtggggcaggacagcaagggggaggattgggaagacaatagcaggcatgctggggatgcggtgggctctatggctctagagcatggctacgtagataagtagcatggcgggttaatcattaactacacctgcaggaggaacccctagtgatggagttggccactccctctctgcgcgctcgctcgctcactgaggccgggcgaccaaaggtcgcccgacgcccgggcggcctcagtgagcgagcgagcgcgcagctgcctgcaggggcgcgcctcgagccatggtgctagcagctgatgcatagcatgcggtaccgggagatgggggaggctaactgaaacacggaaggagacaataccggaaggaacccgcgctatgacggcaataaaaagacagaataaaacgcacgggtgttgggtcgtttgttcataaacgcggggttcggtcccagggctggcactctgtcgataccccaccgagaccccattgggaccaatacgcccgcgtttcttccttttccccaccccaacccccaagttcgggtgaaggcccagggctcgcagccaacgtcggggcggcaagccctgccatagccactacgggtacgtaggccaaccactagaactatagctagagtcctgggcgaacaaacgatgctcgccttccagaaaaccgaggatgcgaaccacttcatccggggtcagcaccaccggcaagcgccgcgacggccgaggtctaccgatctcctgaagccagggcagatccgtgcacagcaccttgccgtagaagaacagcaaggccgccaatgcctgacgatgcgtggagaccgaaaccttgcgctcgttcgccagccaggacagaaatgcctcgacttcgctgctgcccaaggttgccgggtgacgcacaccgtggaaacggatgaaggcacgaacccagttgacataagcctgttcggttcgtaaactgtaatgcaagtagcgtatgcgctcacgcaactggtccagaaccttgaccgaacgcagcggtggtaacggcgcagtggcggttttcatggcttgttatgactgtttttttgtacagtctatgcctcgggcatccaagcagcaagcgcgttacgccgtgggtcgatgtttgatgttatggagcagcaacgatgttacgcagcagcaacgatgttacgcagcagggcagtcgccctaaaacaaagttaggtggctcaagtatgggcatcattcgcacatgtaggctcggccctgaccaagtcaaatccatgcgggctgctcttgatcttttcggtcgtgagttcggagacgtagccacctactcccaacatcagccggactccgattacctcgggaacttgctccgtagtaagacattcatcgcgcttgctgccttcgaccaagaagcggttgttggcgctctcgcggcttacgttctgcccaggtttgagcagccgcgtagtgagatctatatctatgatctcgcagtctccggcgagcaccggaggcagggcattgccaccgcgctcatcaatctcctcaagcatgaggccaacgcgcttggtgcttatgtgatctacgtgcaagcagattacggtgacgatcccgcagtggctctctatacaaagttgggcatacgggaagaagtgatgcactttgatatcgacccaagtaccgccacctaacaattcgttcaagccgagatcggcttcccggccgcggagttgttcggtaaattgtcacaacgccgcgaatatagtctttaccatgcccttggccacgcccctctttaatacgacgggcaatttgcacttcagaaaatgaagagtttgctttagccataacaaaagtccagtatgctttttcacagcataactggactgatttcagtttacaactattctgtctagtttaagactttattgtcatagtttagatctattttgttcagtttaagactttattgtccgcccacacccgcttacgcagggcatccatttattactcaaccgtaaccgattttgccaggttacgcggctggtctgcggtgtgaaataccgcacagatgcgtaaggagaaaataccgcatcaggcgctcttccgcttcctcgctcactgactcgctgcgctcggtcgttcggctgcggcgagcggtatcagctcactcaaaggcggtaatacggttatccacagaatcaggggataacgcaggaaagaacatgtgagcaaaaggccagcaaaaggccaggaaccgtaaaaaggccgcgttgctggcgtttttccataggctccgcccccctgacgagcatcacaaaaatcgacgctcaagtcagaggtggcgaaacccgacaggactataaagataccaggcgtttccccctggaagctccctcgtgcgctctcctgttccgaccctgccgcttaccggatacctgtccgcctttctcccttcgggaagcgtggcgctttctcaatgctcacgctgtaggtatctcagttcggtgtaggtcgttcgctccaagctgggctgtgtgcacgaaccccccgttcagcccgaccgctgcgccttatccggtaactatcgtcttgagtccaacccggtaagacacgacttatcgccactggcagcagccactggtaacaggattagcagagcgaggtatgtaggcggtgctacagagttcttgaagtggtggcctaactacggctacactagaaggacagtatttggtatctgcgctctgctgaagccagttaccttcggaaaaagagttggtagctcttgatccggcaaacaaaccaccgctggtagcggtggtttttttgtttgcaagcagcagattacgcgcagaaaaaaaggatctcaagaagatcctttgatcttttctacggggtctgacgctcagtggaacgaaaactcacgttaagggattttggtcatgagattatcaaaaaggatcttcacctagatccttttaaattaaaaatgaagttttaaatcaatctaaagtatatatgagtaaacttggtctgacagttaccaatgcttaatcagtgaggcacctatctcagcgatctgtctatttcgttcatccatagttgcctgactccccgtcgtgtagataactacgatacgggagggcttaccatctggccccagtgctgcaatgataccgcgagacccacgctcaccggctccagatttatcagcaataaaccagccagccggaagggccgagcgcagaagtggtcctgcaactttatccgcctccatccagtctattaattgttgccgggaagctagagtaagtagttcgccagttaatagtttgcgcaacgttgttgccattgctacaggcatcgtggtgtcacgctcgtcgtttggtatggcttcattcagctccggttcccaacgatcaaggcgagttacatgatcccccatgttgtgcaaaaaagcggttagctccttcggtcctccgatcgttgtcagaagtaagttggccgcagtgttatcactcatggttatggcagcactgcataattctcttactgtcatgccatccgtaagatgcttttctgtgactggtgagtactcaaccaagtcattctgagaatagtgtatgcggcgaccgagttgctcttgcccggcgtcaatacgggataataccgcgccacatagcagaactttaaaagtgctcatcattggaaaacgttcttcggggcgaaaactctcaaggatcttaccgctgttgagatccagttcgatgtaacccactcgtgcacccaactgatcttcagcatcttttactttcaccagcgtttctgggtgagcaaaaacaggaaggcaaaatgccgcaaaaaagggaataagggcgacacggaaatgttgaatactcatactcttcctttttcaatattattgaagcatttatcagggttattgtctcatgagcggatacatatttgaatgtatttagaaaaataaacaaataggggttccgcgcacatttccccgaaaagtgccacctgaaattgtaaacgttaatattttgttaaaattcgcgttaaatttttgttaaatcagctcattttttaaccaataggccgaaatcggcaaaatcccttataaatcaaaagaatagaccgagatagggttgagtgttgttccagtttggaacaagagtccactattaaagaacgtggactccaacgtcaaagggcgaaaaaccgtctatcagggcgatggcccactacgtgaaccatcaccctaatcaagttttttggggtcgaggtgccgtaaagcactaaatcggaaccctaaagggagcccccgatttagagcttgacggggaaagccggcgaacgtggcgagaaaggaagggaagaaagcgaaaggagcgggcgctagggcgctggcaagtgtagcggtcacgctgcgcgtaaccaccacacccgccgcgcttaatgcgccgctacagggcgcgtcccattcgccattcaggctgcaaataagcgttgatattcagtcaattacaaacattaataacgaagagatgacagaaaaattttcattctgtgacagagaa

SEQ ID NO: 193 - DNA, 7780 bp, Artificial Sequence
  Description of Artificial Sequence: Synthetic polynucleotide
ggccggcccctgcaggcagctgcgcgctcgctcgctcactgaggccgcccgggcaaagcccgggcgtcgggcgacctttggtcgcccggcctcagtgagcgagcgagcgcgcagagagggagtggccaactccatcactaggggttccttgtagttaatgattaacccgccatgctacttatctacgtagccatgctctagacgggggaggctgctggtgaatattaaccaaggtcaccccagttatcggaggagcaaacaggggctaagtccacacgcgtggtaccgtctgtctgcacatttcgtagagcgagtgttccgatactctaatctccctaggcaaggttcatatttgtgtaggttacttattctccttttgttgactaagtcaataatcagaatcagcaggtttggagtcagcttggcagggatcagcagcctgggttggaaggagggggtataaaagccccttcaccaggagaagccgtcacacagatccacaagctcctgaagaggtaagggtttaagggatggttggttggtggggtattaatgtttaattacctggagcacctgcctgaaatcactttttttcaggttggtttaaacgccgccaccatgtccactgcggtcctggaaaacccaggcttgggcaggaaactctctgactttggacaggaaacaagctatattgaagacaactgcaatcaaaatggtgccatatcactgatcttctcactcaaagaagaagttggtgcattggccaaagtattgcgcttatttgaggagaatgatgtaaacctgacccacattgaatctagaccttctcgtttaaagaaagatgagtatgaatttttcacccatttggataaacgtagcctgcctgctctgacaaacatcatcaagatcttgaggcatgacattggtgccactgtccatgagctttcacgagataagaagaaagacacagtgccctggttcccaagaaccattcaagagctggacagatttgccaatcagattctcagctatggagcggaactggatgctgaccaccctggttttaaagatcctgtgtaccgtgcaagacggaagcagtttgctgacattgcctacaactaccgccatgggcagcccatccctcgagtggaatacatggaggaagaaaagaaaacatggggcacagtgttcaagactctgaagtccttgtataaaacccatgcttgctatgagtacaatcacatttttccacttcttgaaaagtactgtggcttccatgaagataacattccccagctggaagacgtttctcagttcctgcagacttgcactggtttccgcctccgacctgtggctggcctgctttcctctcgggatttcttgggtggcctggccttccgagtcttccactgcacacagtacatcagacatggatccaagcccatgtatacccccgaacctgacatctgccatgagctgttgggacatgtgcccttgttttcagatcgcagctttgcccagttttcccaggaaattggccttgcctctctgggtgcacctgatgaatacattgaaaagctcgccacaatttactggtttactgtggagtttgggctctgcaaacaaggagactccataaaggcatatggtgctgggctcctgtcatcctttggtgaattacagtactgcttatcagagaagccaaagcttctccccctggagctggagaagacagccatccaaaattacactgtcacggagttccagcccctctattacgtggcagagagttttaatgatgccaaggagaaagtaaggaactttgctgccacaatacctcggcccttctcagttcgctacgacccatacacccaaaggattgaggtcttggacaatacccagcagcttaagattttggctgattccattaacagtgaaattggaatcctttgcagtgccctccagaaaataaagtaattaattaagagcatcttaccgccatttattcccatatttgttctgtttttcttgatttgggtatacatttaaatgttaataaaacaaaatggtggggcaatcatttacatttttagggatatgtaattactagttcaggtgtattgccacaagacaaacatgttaagaaactttcccgttatttacgctctgttcctgttaatcaacctctggattacaaaatttgtgaaagattgactgatattcttaactatgttgctccttttacgctgtgtggatatgctgctttatagcctctgtatctagctattgcttcccgtacggctttcgttttctcctccttgtataaatcctggttgctgtctcttttagaggagttgtggcccgttgtccgtcaacgtggcgtggtgtgctctgtgtttgctgacgcaacccccactggctggggcattgccaccacctgtcaactcctttctgggactttcgctttccccctcccgatcgccacggcagaactcatcgccgcctgccttgcccgctgctggacaggggctaggttgctgggcactgataattccgtggtgttgtctgtgccttctagttgccagccatctgttgtttgcccctcccccgtgccttccttgaccctggaaggtgccactcccactgtcctttcctaataaaatgaggaaattgcatcgcattgtctgagtaggtgtcattctattctggggggtggggtggggcaggacagcaagggggaggattgggaagacaatagcaggcatgctggggatgcggtgggctctatggctctagagcatggctacgtagataagtagcatggcgggttaatcattaactacacctgcaggaggaacccctagtgatggagttggccactccctctctgcgcgctcgctcgctcactgaggccgggcgaccaaaggtcgcccgacgcccgggcggcctcagtgagcgagcgagcgcgcagctgcctgcaggggcgcgcctcgaggcatgcggtaccaagcttgtcgagaagtactagaggatcataatcagccataccacatttgtagaggttttacttgctttaaaaaacctcccacacctccccctgaacctgaaacataaaatgaatgcaattgttgttgttaacttgtttattgcagcttataatggttacaaataaagcaatagcatcacaaatttcacaaataaagcatttttttcactgcattctagttgtggtttgtccaaactcatcaatgtatcttatcatgtctggatctgatcactgatatcgcctaggagatccgaaccagataagtgaaatctagttccaaactattttgtcatttttaattttcgtattagcttacgacgctacacccagttcccatctattttgtcactcttccctaaataatccttaaaaactccatttccacccctcccagttcccaactattttgtccgcccacagcggggcatttttcttcctgttatgtttttaatcaaacatcctgccaactccatgtgacaaaccgtcatcttcggctactttttctctgtcacagaatgaaaatttttctgtcatctcttcgttattaatgtttgtaattgactgaatatcaacgcttatttgcagcctgaatggcgaatgggacgcgccctgtagcggcgcattaagcgcggcgggtgtggtggttacgcgcagcgtgaccgctacacttgccagcgccctagcgcccgctcctttcgctttcttcccttcctttctcgccacgttcgccggctttccccgtcaagctctaaatcgggggctccctttagggttccgatttagtgctttacggcacctcgaccccaaaaaacttgattagggtgatggttcacgtagtgggccatcgccctgatagacggtttttcgccctttgacgttggagtccacgttctttaatagtggactcttgttccaaactggaacaacactcaaccctatctcggtctattcttttgatttataagggattttgccgatttcggcctattggttaaaaaatgagctgatttaacaaaaatttaacgcgaattttaacaaaatattaacgtttacaatttcaggtggcacttttcggggaaatgtgcgcggaacccctatttgtttatttttctaaatacattcaaatatgtatccgctcatgagacaataaccctgataaatgcttcaataatattgaaaaaggaagagtatgagtattcaacatttccgtgtcgcccttattcccttttttgcggcattttgccttcctgtttttgctcacccagaaacgctggtgaaagtaaaagatgctgaagatcagttgggtgcacgagtgggttacatcgaactggatctcaacagcggtaagatccttgagagttttcgccccgaagaacgttttccaatgatgagcacttttaaagttctgctatgtggcgcggtattatcccgtattgacgccgggcaagagcaactcggtcgccgcatacactattctcagaatgacttggttgagtactcaccagtcacagaaaagcatcttacggatggcatgacagtaagagaattatgcagtgctgccataaccatgagtgataacactgcggccaacttacttctgacaacgatcggaggaccgaaggagctaaccgcttttttgcacaacatgggggatcatgtaactcgccttgatcgttgggaaccggagctgaatgaagccataccaaacgacgagcgtgacaccacgatgcctgtagcaatggcaacaacgttgcgcaaactattaactggcgaactacttactctagcttcccggcaacaattaatagactggatggaggcggataaagttgcaggaccacttctgcgctcggcccttccggctggctggtttattgctgataaatctggagccggtgagcgtgggtctcgcggtatcattgcagcactggggccagatggtaagccctcccgtatcgtagttatctacacgacggggagtcaggcaactatggatgaacgaaatagacagatcgctgagataggtgcctcactgattaagcattggtaactgtcagaccaagtttactcatatatactttagattgatttaaaacttcatttttaatttaaaaggatctaggtgaagatcctttttgataatctcatgaccaaaatcccttaacgtgagttttcgttccactgagcgtcagaccccgtagaaaagatcaaaggatcttcttgagatcctttttttctgcgcgtaatctgctgcttgcaaacaaaaaaaccaccgctaccagcggtggtttgtttgccggatcaagagctaccaactctttttccgaaggtaactggcttcagcagagcgcagataccaaatactgtccttctagtgtagccgtagttaggccaccacttcaagaactctgtagcaccgcctacatacctcgctctgctaatcctgttaccagtggctgctgccagtggcgataagtcgtgtcttaccgggttggactcaagacgatagttaccggataaggcgcagcggtcgggctgaacggggggttcgtgcacacagcccagcttggagcgaacgacctacaccgaactgagatacctacagcgtgagcattgagaaagcgccacgcttcccgaagggagaaaggcggacaggtatccggtaagcggcagggtcggaacaggagagcgcacgagggagcttccagggggaaacgcctggtatctttatagtcctgtcgggtttcgccacctctgacttgagcgtcgatttttgtgatgctcgtcaggggggcggagcctatggaaaaacgccagcaacgcggcctttttacggttcctggccttttgctggccttttgctcacatgttctttcctgcgttatcccctgattctgtggataaccgtattaccgcctttgagtgagctgataccgctcgccgcagccgaacgaccgagcgcagcgagtcagtgagcgaggaagcggaagagcgcctgatgcggtattttctccttacgcatctgtgcggtatttcacaccgcagaccagccgcgtaacctggcaaaatcggttacggttgagtaataaatggatgccctgcgtaagcgggtgtgggcggacaataaagtcttaaactgaacaaaatagatctaaactatgacaataaagtcttaaactagacagaatagttgtaaactgaaatcagtccagttatgctgtgaaaaagcatactggacttttgttatggctaaagcaaactcttcattttctgaagtgcaaattgcccgtcgtattaaagaggggcgtggccaagggcatggtaaagactatattcgcggcgttgtgacaatttaccgaacaactccgcggccgggaagccgatctcggcttgaacgaattgttaggtggcggtacttgggtcgatatcaaagtgcatcacttcttcccgtatgcccaactttgtatagagagccactgcgggatcgtcaccgtaatctgcttgcacgtagatcacataagcaccaagcgcgttggcctcatgcttgaggagattgatgagcgcggtggcaatgccctgcctccggtgctcgccggagactgcgagatcatagatatagatctcactacgcggctgctcaaacctgggcagaacgtaagccgcgagagcgccaacaaccgcttcttggtcgaaggcagcaagcgcgatgaatgtcttactacggagcaagttcccgaggtaatcggagtccggctgatgttgggagtaggtggctacgtctccgaactcacgaccgaaaagatcaagagcagcccgcatggatttgacttggtcagggccgagcctacatgtgcgaatgatgcccatacttgagccacctaactttgttttagggcgactgccctgctgcgtaacatcgttgctgctgcgtaacatcgttgctgctccataacatcaaacatcgacccacggcgtaacgcgcttgctgcttggatgcccgaggcatagactgtacaaaaaaacagtcataacaagccatgaaaaccgccactgcgccgttaccaccgctgcgttcggtcaaggttctggaccagttgcgtgagcgcatacgctacttgcattacagtttacgaaccgaacaggcttatgtcaactgggttcgtgccttcatccgtttccacggtgtgcgtcacccggcaaccttgggcagcagcgaagtcgaggcatttctgtcctggctggcgaacgagcgcaaggtttcggtctccacgcatcgtcaggcattggcggccttgctgttcttctacggcaaggtgctgtgcacggatctgccctggcttcaggagatcggaagacctcggccgtcgcggcgcttgccggtggtgctgaccccggatgaagtggttcgcatcctcggttttctggaaggcgagcatcgtttgttcgcccaggactctagctatagttctagtggttggctacgtatactccggaatattaatagatcatggagataattaaaatgataaccatctcgcaaataaataagtattttactgttttcgtaacagttttgtaataaaaaaacctataaatattccggattattcataccgtcccaccatcgggcgcggatctcggtccgaaaccatgtcgtactaccatcaccatcaccatcacgattacgatatcccaacgaccgaaaacctgtattttcagggcgccatgggatcc

SEQ ID NO: 194 - DNA, 3222 bp, Artificial Sequence
  Description of Artificial Sequence: Synthetic polynucleotide
cctgcaggcagctgcgcgctcgctcgctcactgaggccgcccgggcaaagcccgggcgtcgggcgacctttggtcgcccggcctcagtgagcgagcgagcgcgcagagagggagtggccaactccatcactaggggttccttgtagttaatgattaacccgccatgctacttatcgcggccgcgggggaggctgctggtgaatattaaccaaggtcaccccagttatcggaggagcaaacaggggctaagtccaccgggggaggctgctggtgaatattaaccaaggtcaccccagttatcggaggagcaaacaggggctaagtccaccgggggaggctgctggtgaatattaaccaaggtcaccccagttatcggaggagcaaacaggggctaagtccacggtacccactgggaggatgttgagtaagatggaaaactactgatgacccttgcagagacagagtattaggacatgtttgaacaggggccgggcgatcagcaggtagctctagaggatccccgtctgtctgcacatttcgtagagcgagtgttccgatactctaatctccctaggcaaggttcatatttgtgtaggttacttattctccttttgttgactaagtcaataatcagaatcagcaggtttggagtcagcttggcagggatcagcagcctgggttggaaggagggggtataaaagccccttcaccaggagaagccgtcacacagatccacaagctcctgaagaggtaagggtttaagggatggttggttggtggggtattaatgtttaattacctggagcacctgcctgaaatcactttttttcaggttgggtttaaaccgcagccaccatgagcaccgccgtgctggaaaatcctggcctgggcagaaagctgagcgacttcggccaagagacaagctacatcgaggacaactgcaaccagaacggcgccatcagcctgatcttcagcctgaaagaagaagtgggcgccctggccaaggtgctgagactgttcgaagagaacgacgtgaacctgacacacatcgagagcagacccagcagactgaagaaggacgagtacgagttcttcacccacctggacaagcggagcctgcctgctctgaccaacatcatcaagatcctgcggcacgacatcggcgccacagtgcacgaactgagccgggacaagaaaaaggacaccgtgccatggttccccagaaccatccaagagctggacagattcgccaaccagatcctgagctatggcgccgagctggacgctgatcaccctggctttaaggaccccgtgtaccgggccagaagaaagcagtttgccgatatcgcctacaactaccggcacggccagcctattcctcgggtcgagtacatggaagaggaaaagaaaacctggggcaccgtgttcaagaccctgaagtccctgtacaagacccacgcctgctacgagtacaaccacatcttcccactgctcgaaaagtactgcggcttccacgaggacaatatccctcagcttgaggacgtgtcccagttcctgcagacctgcaccggctttagactgaggccagttgccggactgctgagcagcagagattttctcggcggcctggccttcagagtgttccactgtacccagtacatcagacacggcagcaagcccatgtacacccctgagcctgatatctgccacgagctgctgggacatgtgcccctgttcagcgatagaagcttcgcccagttcagccaagagatcggactggcttctctgggagcccctgacgagtacattgagaagctggccaccatctactggttcaccgtggaattcggcctgtgcaagcagggcgacagcatcaaagcttatggcgctggcctgctgtctagcttcggcgagctgcagtactgtctgagcgagaagcctaagctgctgcccctggaactggaaaagaccgccatccagaactacaccgtgaccgagttccagcctctgtactacgtggccgagagcttcaacgacgccaaagaaaaagtgcggaacttcgccgccaccattcctcggcctttcagcgtcagatacgacccctacacacagcggatcgaggtgctggacaacacacagcagctgaaaattctggccgactccatcaacagcgagatcggcatcctgtgcagcgccctgcagaaaatcaagtgatagttaattaagagcatcttaccgccatttattcccatatttgttctgtttttcttgatttgggtatacatttaaatgttaataaaacaaaatggtggggcaatcatttacatttttagggatatgtaattactagttcaggtgtattgccacaagacaaacatgttaagaaactttcccgttatttacgctctgttcctgttaatcaacctctggattacaaaatttgtgaaagattgactgatattcttaactatgttgctccttttacgctgtgtggatatgctgctttatagcctctgtatctagctattgcttcccgtacggctttcgttttctcctccttgtataaatcctggttgctgtctcttttagaggagttgtggcccgttgtccgtcaacgtggcgtggtgtgctctgtgtttgctgacgcaacccccactggctggggcattgccaccacctgtcaactcctttctgggactttcgctttccccctcccgatcgccacggcagaactcatcgccgcctgccttgcccgctgctggacaggggctaggttgctgggcactgataattccgtggtgttgtctgtgccttctagttgccagccatctgttgtttgcccctcccccgtgccttccttgaccctggaaggtgccactcccactgtcctttcctaataaaatgaggaaattgcatcgcattgtctgagtaggtgtcattctattctggggggtggggtggggcaggacagcaagggggaggattgggaagacaatagcaggcatgctggggatgcggtgggctctatggctctagagcatggctacgtagataagtagcatggcgggttaatcattaactacacctgcaggaggaacccctagtgatggagttggccactccctctctgcgcgctcgctcgctcactgaggccgggcgaccaaaggtcgcccgacgcccgggcggcctcagtgagcgagcgagcgcgcagctgcctgcagg

SEQ ID NO: 195 - DNA, 2883 bp, Homo sapiens
cctgcaggcagctgcgcgctcgctcgctcactgaggccgcccgggcaaagcccgggcgtcgggcgacctttggtcgcccggcctcagtgagcgagcgagcgcgcagagagggagtggccaactccatcactaggggttccttgtagttaatgattaacccgccatgctacttatcgcggccgccgggggaggctgctggtgaatattaaccaaggtcaccccagttatcggaggagcaaacaggggctaagtccacacgcgtggtaccgtctgtctgcacatttcgtagagcgagtgttccgatactctaatctccctaggcaaggttcatatttgtgtaggttacttattctccttttgttgactaagtcaataatcagaatcagcaggtttggagtcagcttggcagggatcagcagcctgggttggaaggagggggtataaaagccccttcaccaggagaagccgtcacacagatccacaagctcctgaagaggtaagggtttaagggatggttggttggtggggtattaatgtttaattacctggagcacctgcctgaaatcactttttttcaggttggtttaaaccgcagccaccatgaaccagaacggcgccatcagcctgatcttcagcctgaaagaagaagtgggcgccctggccaaggtgctgagactgttcgaagagaacgacgtgaacctgacacacatcgagagcagacccagcagactgaagaaggacgagtacgagttcttcacccacctggacaagcggagcctgcctgctctgaccaacatcatcaagatcctgcggcacgacatcggcgccacagtgcacgaactgagccgggacaagaaaaaggacaccgtgccatggttccccagaaccatccaagagctggacagattcgccaaccagatcctgagctatggcgccgagctggacgctgatcaccctggctttaaggaccccgtgtaccgggccagaagaaagcagtttgccgatatcgcctacaactaccggcacggccagcctattcctcgggtcgagtacatggaagaggaaaagaaaacctggggcaccgtgttcaagaccctgaagtccctgtacaagacccacgcctgctacgagtacaaccacatcttcccactgctcgaaaagtactgcggcttccacgaggacaatatccctcagcttgaggacgtgtcccagttcctgcagacctgcaccggctttagactgaggccagttgccggactgctgagcagcagagattttctcggcggcctggccttcagagtgttccactgtacccagtacatcagacacggcagcaagcccatgtacacccctgagcctgatatctgccacgagctgctgggacatgtgcccctgttcagcgatagaagcttcgcccagttcagccaagagatcggactggcttctctgggagcccctgacgagtacattgagaagctggccaccatctactggttcaccgtggaattcggcctgtgcaagcagggcgacagcatcaaagcttatggcgctggcctgctgtctagcttcggcgagctgcagtactgtctgagcgagaagcctaagctgctgcccctggaactggaaaagaccgccatccagaactacaccgtgaccgagttccagcctctgtactacgtggccgagagcttcaacgacgccaaagaaaaagtgcggaacttcgccgccaccattcctcggcctttcagcgtcagatacgacccctacacacagcggatcgaggtgctggacaacacacagcagctgaaaattctggccgactccatcaacagcgagatcggcatcctgtgcagcgccctgcagaaaatcaagtgatagttaattaagagcatcttaccgccatttattcccatatttgttctgtttttcttgatttgggtatacatttaaatgttaataaaacaaaatggtggggcaatcatttacatttttagggatatgtaattactagttcaggtgtattgccacaagacaaacatgttaagaaactttcccgttatttacgctctgttcctgttaatcaacctctggattacaaaatttgtgaaagattgactgatattcttaactatgttgctccttttacgctgtgtggatatgctgctttatagcctctgtatctagctattgcttcccgtacggctttcgttttctcctccttgtataaatcctggttgctgtctcttttagaggagttgtggcccgttgtccgtcaacgtggcgtggtgtgctctgtgtttgctgacgcaacccccactggctggggcattgccaccacctgtcaactcctttctgggactttcgctttccccctcccgatcgccacggcagaactcatcgccgcctgccttgcccgctgctggacaggggctaggttgctgggcactgataattccgtggtgttgtctgtgccttctagttgccagccatctgttgtttgcccctcccccgtgccttccttgaccctggaaggtgccactcccactgtcctttcctaataaaatgaggaaattgcatcgcattgtctgagtaggtgtcattctattctggggggtggggtggggcaggacagcaagggggaggattgggaagacaatagcaggcatgctggggatgcggtgggctctatggctctagagcatggctacgtagataagtagcatggcgggttaatcattaactacacctgcaggaggaacccctagtgatggagttggccactccctctctgcgcgctcgctcgctcactgaggccgggcgaccaaaggtcgcccgacgcccgggcggcctcagtgagcgagcgagcgcgcagctgcctgcagg

SEQ ID NO: 196 - DNA, 4089 bp, Artificial Sequence
  Description of Artificial Sequence: Synthetic polynucleotide
cctgcaggcagctgcgcgctcgctcgctcactgaggccgcccgggcaaagcccgggcgtcgggcgacctttggtcgcccggcctcagtgagcgagcgagcgcgcagagagggagtggccaactccatcactaggggttccttgtagttaatgattaacccgccatgctacttatcgcggccgcgggggaggctgctggtgaatattaaccaaggtcaccccagttatcggaggagcaaacaggggctaagtccaccgggggaggctgctggtgaatattaaccaaggtcaccccagttatcggaggagcaaacaggggctaagtccaccgggggaggctgctggtgaatattaaccaaggtcaccccagttatcggaggagcaaacaggggctaagtccacggtacccactgggaggatgttgagtaagatggaaaactactgatgacccttgcagagacagagtattaggacatgtttgaacaggggccgggcgatcagcaggtagctctagaggatccccgtctgtctgcacatttcgtagagcgagtgttccgatactctaatctccctaggcaaggttcatatttgtgtaggttacttattctccttttgttgactaagtcaataatcagaatcagcaggtttggagtcagcttggcagggatcagcagcctgggttggaaggagggggtataaaagccccttcaccaggagaagccgtcacacagatccacaagctcctgaagaggtaagggtttaagggatggttggttggtggggtattaatgtttaattacctggagcacctgcctgaaatcactttttttcaggttgggtttaaaccgcagccaccatgtccacagctgtgctggagaaccctggcctgggcagaaagctgtctgactttggccaggtgagccagggcagcctgagctgctcagttaggggaatttgggcctccagagaaagagatcccaagactgctggtgcttcctggtttcataagctcagtaagaagtctgaattggttggaagctgatgagaatatccaggaagtcaacagacaaatgtcctcaacaattgtttctaagtaggagaacatctgtcctgggtggctttcacaggaatgaatgaccattgctttagggggttggggatctggcctccagaactgccaccaattagctgtgtgtctttggacaagttactgtccctctctgttgtctgtttactcttctgtacactgaaggggttccaatccaggtcttaggattcaaaagcctgtgcatgttccatttttagtactttccacactgtatttctcaatgtctttctgggacattttataaatcatattatatcacctctaaggatctttcagtttgttatatatgtgtctattaagttagattgtgagctcctaaaagataaagcattgtcttattcatctttaaatttctcagagcccaaatagtgcctggaacctagtagttgctcaataaaaggtattgaatttacaggattgaatggtgacatcaatgaataattgaagattccttaagctgataactgacccagtagcatcattgatcatttaattgccctggacttacttattttccaccacactacatatttctgtatagaatatatatagctcattgtattgcaagatttaactagaagaaagagttcatgcttgctttgtccatgtaggtttaacaggaatgaattgctaaactgtggaaaatgttttaaacaaatgcatcttatcctgtaggagacctcctacattgaggacaactgcaaccagaatggagccatctccctgatcttctccctgaaggaggaggtgggagccctggccaaggtgctgagactgtttgaggagaatgatgtgaacctgacccacattgagtccagaccctccagactgaagaaggatgagtatgagttcttcacccacctggacaagagatccctgcctgccctgaccaacatcatcaagatcctgagacatgacattggagccacagtgcatgagctgtccagagacaagaagaaggacacagtgccctggttccccagaaccatccaggagctggacagatttgccaaccagatcctgtcctatggagctgagctggatgctgaccaccctggcttcaaggaccctgtgtacagggccagaagaaagcagtttgctgacattgcctacaactacagacatggccagcccatccccagagtggagtacatggaggaggagaagaagacctggggcacagtgttcaagaccctgaagtccctgtacaagacccatgcctgctatgagtacaaccacatcttccccctgctggagaagtactgtggcttccatgaggacaacatcccccagctggaggatgtgtcccagttcctgcagacctgcacaggcttcagactgagacctgtggctggcctgctgtcctccagagacttcctgggaggcctggccttcagagtgttccactgcacccagtacatcagacatggctccaagcccatgtacacccctgagcctgacatctgccatgagctgctgggccatgtgcccctgttctctgacagatcctttgcccagttctcccaggagattggcctggcctccctgggagcccctgatgagtacattgagaagctggccaccatctactggttcacagtggagtttggcctgtgcaagcagggagactccatcaaggcctatggagctggcctgctgtcctcctttggagagctgcagtactgcctgtctgagaagcccaagctgctgcccctggagctggagaagacagccatccagaactacacagtgacagagttccagcccctgtactatgtggctgagtccttcaatgatgccaaggagaaggtcagaaactttgctgccaccatccccagacccttctctgtgagatatgacccctacacccagagaattgaggtgctggacaacacccagcagctgaagatcctggctgactccatcaactctgagattggcatcctgtgctctgccctgcagaagatcaagtaaaccttaattaagagcatcttaccgccatttattcccatatttgttctgtttttcttgatttgggtatacatttaaatgttaataaaacaaaatggtggggcaatcatttacatttttagggatatgtaattactagttcaggtgtattgccacaagacaaacatgttaagaaactttcccgttatttacgctctgttcctgttaatcaacctctggattacaaaatttgtgaaagattgactgatattcttaactatgttgctccttttacgctgtgtggatatgctgctttatagcctctgtatctagctattgcttcccgtacggctttcgttttctcctccttgtataaatcctggttgctgtctcttttagaggagttgtggcccgttgtccgtcaacgtggcgtggtgtgctctgtgtttgctgacgcaacccccactggctggggcattgccaccacctgtcaactcctttctgggactttcgctttccccctcccgatcgccacggcagaactcatcgccgcctgccttgcccgctgctggacaggggctaggttgctgggcactgataattccgtggtgttgtctgtgccttctagttgccagccatctgttgtttgcccctcccccgtgccttccttgaccctggaaggtgccactcccactgtcctttcctaataaaatgaggaaattgcatcgcattgtctgagtaggtgtcattctattctggggggtggggtggggcaggacagcaagggggaggattgggaagacaatagcaggcatgctggggatgcggtgggctctatggctctagagcatggctacgtagataagtagcatggcgggttaatcattaactacacctgcaggaggaacccctagtgatggagttggccactccctctctgcgcgctcgctcgctcactgaggccgggcgaccaaaggtcgcccgacgcccgggcggcctcagtgagcgagcgagcgcgcagctgcctgcagg

SEQ ID NO: 197 - DNA, 4089 bp, Artificial Sequence
  Description of Artificial Sequence: Synthetic polynucleotide
cctgcaggcagctgcgcgctcgctcgctcactgaggccgcccgggcaaagcccgggcgtcgggcgacctttggtcgcccggcctcagtgagcgagcgagcgcgcagagagggagtggccaactccatcactaggggttccttgtagttaatgattaacccgccatgctacttatcgcggccgcgggggaggctgctggtgaatattaaccaaggtcaccccagttatcggaggagcaaacaggggctaagtccaccgggggaggctgctggtgaatattaaccaaggtcaccccagttatcggaggagcaaacaggggctaagtccaccgggggaggctgctggtgaatattaaccaaggtcaccccagttatcggaggagcaaacaggggctaagtccacggtacccactgggaggatgttgagtaagatggaaaactactgatgacccttgcagagacagagtattaggacatgtttgaacaggggccgggcgatcagcaggtagctctagaggatccccgtctgtctgcacatttcgtagagcgagtgttccgatactctaatctccctaggcaaggttcatatttgtgtaggttacttattctccttttgttgactaagtcaataatcagaatcagcaggtttggagtcagcttggcagggatcagcagcctgggttggaaggagggggtataaaagccccttcaccaggagaagccgtcacacagatccacaagctcctgaagaggtaagggtttaagggatggttggttggtggggtattaatgtttaattacctggagcacctgcctgaaatcactttttttcaggttgggtttaaaccgcagccaccatgtccacagctgtgctggagaaccctggcttgggcaggaaactctctgactttggacaggtgagccagggcagcctgagctgctcagttaggggaatttgggcctccagagaaagagatcccaagactgctggtgcttcctggtttcataagctcagtaagaagtctgaattggttggaagctgatgagaatatccaggaagtcaacagacaaatgtcctcaacaattgtttctaagtaggagaacatctgtcctgggtggctttcacaggaatgaatgaccattgctttagggggttggggatctggcctccagaactgccaccaattagctgtgtgtctttggacaagttactgtccctctctgttgtctgtttactcttctgtacactgaaggggttccaatccaggtcttaggattcaaaagcctgtgcatgttccatttttagtactttccacactgtatttctcaatgtctttctgggacattttataaatcatattatatcacctctaaggatctttcagtttgttatatatgtgtctattaagttagattgtgagctcctaaaagataaagcattgtcttattcatctttaaatttctcagagcccaaatagtgcctggaacctagtagttgctcaataaaaggtattgaatttacaggattgaatggtgacatcaatgaataattgaagattccttaagctgataactgacccagtagcatcattgatcatttaattgccctggacttacttattttccaccacactacatatttctgtatagaatatatatagctcattgtattgcaagatttaactagaagaaagagttcatgcttgctttgtccatgtaggtttaacaggaatgaattgctaaactgtggaaaatgttttaaacaaatgcatcttatcctgtaggaaacaagctatattgaagacaactgcaatcaaaatggagccatctccctgatcttctccctgaaggaggaggtgggagccctggccaaggtgctgagactgtttgaggagaatgatgtgaacctgacccacattgagtccagaccctccagactgaagaaggatgagtatgagttcttcacccacctggacaagagatccctgcctgccctgaccaacatcatcaagatcctgagacatgacattggagccacagtgcatgagctgtccagagacaagaagaaggacacagtgccctggttccccagaaccatccaggagctggacagatttgccaaccagatcctgtcctatggagctgagctggatgctgaccaccctggcttcaaggaccctgtgtacagggccagaagaaagcagtttgctgacattgcctacaactacagacatggccagcccatccccagagtggagtacatggaggaggagaagaagacctggggcacagtgttcaagaccctgaagtccctgtacaagacccatgcctgctatgagtacaaccacatcttccccctgctggagaagtactgtggcttccatgaggacaacatcccccagctggaggatgtgtcccagttcctgcagacctgcacaggcttcagactgagacctgtggctggcctgctgtcctccagagacttcctgggaggcctggccttcagagtgttccactgcacccagtacatcagacatggctccaagcccatgtacacccctgagcctgacatctgccatgagctgctgggccatgtgcccctgttctctgacagatcctttgcccagttctcccaggagattggcctggcctccctgggagcccctgatgagtacattgagaagctggccaccatctactggttcacagtggagtttggcctgtgcaagcagggagactccatcaaggcctatggagctggcctgctgtcctcctttggagagctgcagtactgcctgtctgagaagcccaagctgctgcccctggagctggagaagacagccatccagaactacacagtgacagagttccagcccctgtactatgtggctgagtccttcaatgatgccaaggagaaggtcagaaactttgctgccaccatccccagacccttctctgtgagatatgacccctacacccagagaattgaggtgctggacaacacccagcagctgaagatcctggctgactccatcaactctgagattggcatcctgtgctctgccctgcagaagatcaagtaaaccttaattaagagcatcttaccgccatttattcccatatttgttctgtttttcttgatttgggtatacatttaaatgttaataaaacaaaatggtggggcaatcatttacatttttagggatatgtaattactagttcaggtgtattgccacaagacaaacatgttaagaaactttcccgttatttacgctctgttcctgttaatcaacctctggattacaaaatttgtgaaagattgactgatattcttaactatgttgctccttttacgctgtgtggatatgctgctttatagcctctgtatctagctattgcttcccgtacggctttcgttttctcctccttgtataaatcctggttgctgtctcttttagaggagttgtggcccgttgtccgtcaacgtggcgtggtgtgctctgtgtttgctgacgcaacccccactggctggggcattgccaccacctgtcaactcctttctgggactttcgctttccccctcccgatcgccacggcagaactcatcgccgcctgccttgcccgctgctggacaggggctaggttgctgggcactgataattccgtggtgttgtctgtgccttctagttgccagccatctgttgtttgcccctcccccgtgccttccttgaccctggaaggtgccactcccactgtcctttcctaataaaatgaggaaattgcatcgcattgtctgagtaggtgtcattctattctggggggtggggtggggcaggacagcaagggggaggattgggaagacaatagcaggcatgctggggatgcggtgggctctatggctctagagcatggctacgtagataagtagcatggcgggttaatcattaactacacctgcaggaggaacccctagtgatggagttggccactccctctctgcgcgctcgctcgctcactgaggccgggcgaccaaaggtcgcccgacgcccgggcggcctcagtgagcgagcgagcgcgcagctgcctgcagg

SEQ ID NO: 198 - DNA, 3451 bp, Artificial Sequence
  Description of Artificial Sequence: Synthetic polynucleotide
cctgcaggcagctgcgcgctcgctcgctcactgaggccgcccgggcaaagcccgggcgtcgggcgacctttggtcgcccggcctcagtgagcgagcgagcgcgcagagagggagtggccaactccatcactaggggttccttgtagttaatgattaacccgccatgctacttatcgcggccgcgggggaggctgctggtgaatattaaccaaggtcaccccagttatcggaggagcaaacaggggctaagtccaccgggggaggctgctggtgaatattaaccaaggtcaccccagttatcggaggagcaaacaggggctaagtccaccgggggaggctgctggtgaatattaaccaaggtcaccccagttatcggaggagcaaacaggggctaagtccacggtacccactgggaggatgttgagtaagatggaaaactactgatgacccttgcagagacagagtattaggacatgtttgaacaggggccgggcgatcagcaggtagctctagaggatccccgtctgtctgcacatttcgtagagcgagtgttccgatactctaatctccctaggcaaggttcatatttgtgtaggttacttattctccttttgttgactaagtcaataatcagaatcagcaggtttggagtcagcttggcagggatcagcagcctgggttggaaggagggggtataaaagccccttcaccaggagaagccgtcacacagatccacaagctcctgaagaggtaagggtttaagggatggttggttggtggggtattaatgtttaattacctggagcacctgcctgaaatcactttttttcaggttgggtttaaaccgcagccaccatgtccacagctgtgctggagaaccctggcttgggcaggaaactctctgactttggacaggtgagccagggcagcctgagctgctcagttaggggaatttgggcctccagagaaagagatctgaagactgctggtgcttcctggtttcataagctcagtaagaagtctgaattcattggaagctgatgatagaagaaagagttcatgcttgctttgtccatggaggtttaacaggaatgaattgctaaactgtggaaaatgttttaaacaaatgcatcttatcctgtaggaaacaagctatattgaagacaactgcaatcaaaatggagccatctccctgatcttctccctgaaggaggaggtgggagccctggccaaggtgctgagactgtttgaggagaatgatgtgaacctgacccacattgagtccagaccctccagactgaagaaggatgagtatgagttcttcacccacctggacaagagatccctgcctgccctgaccaacatcatcaagatcctgagacatgacattggagccacagtgcatgagctgtccagagacaagaagaaggacacagtgccctggttccccagaaccatccaggagctggacagatttgccaaccagatcctgtcctatggagctgagctggatgctgaccaccctggcttcaaggaccctgtgtacagggccagaagaaagcagtttgctgacattgcctacaactacagacatggccagcccatccccagagtggagtacatggaggaggagaagaagacctggggcacagtgttcaagaccctgaagtccctgtacaagacccatgcctgctatgagtacaaccacatcttccccctgctggagaagtactgtggcttccatgaggacaacatcccccagctggaggatgtgtcccagttcctgcagacctgcacaggcttcagactgagacctgtggctggcctgctgtcctccagagacttcctgggaggcctggccttcagagtgttccactgcacccagtacatcagacatggctccaagcccatgtacacccctgagcctgacatctgccatgagctgctgggccatgtgcccctgttctctgacagatcctttgcccagttctcccaggagattggcctggcctccctgggagcccctgatgagtacattgagaagctggccaccatctactggttcacagtggagtttggcctgtgcaagcagggagactccatcaaggcctatggagctggcctgctgtcctcctttggagagctgcagtactgcctgtctgagaagcccaagctgctgcccctggagctggagaagacagccatccagaactacacagtgacagagttccagcccctgtactatgtggctgagtccttcaatgatgccaaggagaaggtcagaaactttgctgccaccatccccagacccttctctgtgagatatgacccctacacccagagaattgaggtgctggacaacacccagcagctgaagatcctggctgactccatcaactctgagattggcatcctgtgctctgccctgcagaagatcaagtaaaccttaattaagagcatcttaccgccatttattcccatatttgttctgtttttcttgatttgggtatacatttaaatgttaataaaacaaaatggtggggcaatcatttacatttttagggatatgtaattactagttcaggtgtattgccacaagacaaacatgttaagaaactttcccgttatttacgctctgttcctgttaatcaacctctggattacaaaatttgtgaaagattgactgatattcttaactatgttgctccttttacgctgtgtggatatgctgctttatagcctctgtatctagctattgcttcccgtacggctttcgttttctcctccttgtataaatcctggttgctgtctcttttagaggagttgtggcccgttgtccgtcaacgtggcgtggtgtgctctgtgtttgctgacgcaacccccactggctggggcattgccaccacctgtcaactcctttctgggactttcgctttccccctcccgatcgccacggcagaactcatcgccgcctgccttgcccgctgctggacaggggctaggttgctgggcactgataattccgtggtgttgtctgtgccttctagttgccagccatctgttgtttgcccctcccccgtgccttccttgaccctggaaggtgccactcccactgtcctttcctaataaaatgaggaaattgcatcgcattgtctgagtaggtgtcattctattctggggggtggggtggggcaggacagcaagggggaggattgggaagacaatagcaggcatgctggggatgcggtgggctctatggctctagagcatggctacgtagataagtagcatggcgggttaatcattaactacacctgcaggaggaacccctagtgatggagttggccactccctctctgcgcgctcgctcgctcactgaggccgggcgaccaaaggtcgcccgacgcccgggcggcctcagtgagcgagcgagcgcgcagctgcctgcagg

SEQ ID NO: 199 - DNA, 4042 bp, Artificial Sequence
  Description of Artificial Sequence: Synthetic polynucleotide
cctgcaggcagctgcgcgctcgctcgctcactgaggccgcccgggcaaagcccgggcgtcgggcgacctttggtcgcccggcctcagtgagcgagcgagcgcgcagagagggagtggccaactccatcactaggggttccttgtagttaatgattaacccgccatgctacttatcgcggccgcgggggaggctgctggtgaatattaaccaaggtcaccccagttatcggaggagcaaacaggggctaagtccaccgggggaggctgctggtgaatattaaccaaggtcaccccagttatcggaggagcaaacaggggctaagtccaccgggggaggctgctggtgaatattaaccaaggtcaccccagttatcggaggagcaaacaggggctaagtccacggtacccactgggaggatgttgagtaagatggaaaactactgatgacccttgcagagacagagtattaggacatgtttgaacaggggccgggcgatcagcaggtagctctagaggatccccgtctgtctgcacatttcgtagagcgagtgttccgatactctaatctccctaggcaaggttcatatttgtgtaggttacttattctccttttgttgactaagtcaataatcagaatcagcaggtttggagtcagcttggcagggatcagcagcctgggttggaaggagggggtataaaagccccttcaccaggagaagccgtcacacagatccacaagctcctgaagaggtaagggtttaagggatggttggttggtggggtattaatgtttaattacctggagcacctgcctgaaatcactttttttcaggttgggtttaaaccgcagccaccatgagcaccgccgtgctggaaaatcctggcttgggcaggaaactctctgactttggacaggtaagcctgttgggcttccactgctaggagagaattggttccccacatgtgaaagcagtctgggaaatgctggtatttccagtctcctaaggctactaagaaatatgactttatttagaggcgaggaaaatgcccaggaagtcaactgatgagtctagtcttaacaagttgaggatacagaaagttggggatctgagctgctaccaacatctgtgtgtctttgggtggctcattggtatcctctgcctattggctttatcttctgtacactgaaaggaaatggctggtccttagtcacctacccaggtcttggatccatagcctacggatgtcccatttttattgctttttatattttgtctcccagtgtctttttgaggattttttttttttttttgcatcacttgctcttcctctaagaatctcctgacttcttgtacatgtgtctgatggtcagaattttagcactgaagtatgggcgtatttatcataattcaggtttatatcctttcagatatgggctagggtctggtattagggtgctcattaaaaaatgttgatttttgtcagtgtctagtgacatcaatgcataatttaaggttctataaattgaaagctaacccaggagtgactcatcctctcattgttttcaacttacttatttctgatcacactgacttccctgtggaatacacgtggttcactgtgttccaaagcttaacgagcagaaaaaggttatgctcgtctcttcttgagaggttttaagagaataattgctaagctgtgaaaaacattttaaccaagtgatctaattatgtaggaaacaagctatattgaagacaactgcaatcaaaacggcgccatcagcctgatcttcagcctgaaagaagaagtgggcgccctggccaaggtgctgagactgttcgaagagaacgacgtgaacctgacacacatcgagagcagacccagcagactgaagaaggacgagtacgagttcttcacccacctggacaagcggagcctgcctgctctgaccaacatcatcaagatcctgcggcacgacatcggcgccacagtgcacgaactgagccgggacaagaaaaaggacaccgtgccatggttccccagaaccatccaagagctggacagattcgccaaccagatcctgagctatggcgccgagctggacgctgatcaccctggctttaaggaccccgtgtaccgggccagaagaaagcagtttgccgatatcgcctacaactaccggcacggccagcctattcctcgggtcgagtacatggaagaggaaaagaaaacctggggcaccgtgttcaagaccctgaagtccctgtacaagacccacgcctgctacgagtacaaccacatcttcccactgctcgaaaagtactgcggcttccacgaggacaatatccctcagcttgaggacgtgtcccagttcctgcagacctgcaccggctttagactgaggccagttgccggactgctgagcagcagagattttctcggcggcctggccttcagagtgttccactgtacccagtacatcagacacggcagcaagcccatgtacacccctgagcctgatatctgccacgagctgctgggacatgtgcccctgttcagcgatagaagcttcgcccagttcagccaagagatcggactggcttctctgggagcccctgacgagtacattgagaagctggccaccatctactggttcaccgtggaattcggcctgtgcaagcagggcgacagcatcaaagcttatggcgctggcctgctgtctagcttcggcgagctgcagtactgtctgagcgagaagcctaagctgctgcccctggaactggaaaagaccgccatccagaactacaccgtgaccgagttccagcctctgtactacgtggccgagagcttcaacgacgccaaagaaaaagtgcggaacttcgccgccaccattcctcggcctttcagcgtcagatacgacccctacacacagcggatcgaggtgctggacaacacacagcagctgaaaattctggccgactccatcaacagcgagatcggcatcctgtgcagcgccctgcagaaaatcaagtgatagttaattaagagcatcttaccgccatttattcccatatttgttctgtttttcttgatttgggtatacatttaaatgttaataaaacaaaatggtggggcaatcatttacatttttagggatatgtaattactagttcaggtgtattgccacaagacaaacatgttaagaaactttcccgttatttacgctctgttcctgttaatcaacctctggattacaaaatttgtgaaagattgactgatattcttaactatgttgctccttttacgctgtgtggatatgctgctttatagcctctgtatctagctattgcttcccgtacggctttcgttttctcctccttgtataaatcctggttgctgtctcttttagaggagttgtggcccgttgtccgtcaacgtggcgtggtgtgctctgtgtttgctgacgcaacccccactggctggggcattgccaccacctgtcaactcctttctgggactttcgctttccccctcccgatcgccacggcagaactcatcgccgcctgccttgcccgctgctggacaggggctaggttgctgggcactgataattccgtggtgttgtctgtgccttctagttgccagccatctgttgtttgcccctcccccgtgccttccttgaccctggaaggtgccactcccactgtcctttcctaataaaatgaggaaattgcatcgcattgtctgagtaggtgtcattctattctggggggtggggtggggcaggacagcaagggggaggattgggaagacaatagcaggcatgctggggatgcggtgggctctatggctctagagcatggctacgtagataagtagcatggcgggttaatcattaactacacctgcaggaggaacccctagtgatggagttggccactccctctctgcgcgctcgctcgctcactgaggccgggcgaccaaaggtcgcccgacgcccgggcggcctcagtgagcgagcgagcgcgcagctgcctgcagg

SEQ ID NO: 200 - DNA, 3451 bp, Artificial Sequence
  Description of Artificial Sequence: Synthetic polynucleotide
cctgcaggcagctgcgcgctcgctcgctcactgaggccgcccgggcaaagcccgggcgtcgggcgacctttggtcgcccggcctcagtgagcgagcgagcgcgcagagagggagtggccaactccatcactaggggttccttgtagttaatgattaacccgccatgctacttatcgcggccgcgggggaggctgctggtgaatattaaccaaggtcaccccagttatcggaggagcaaacaggggctaagtccaccgggggaggctgctggtgaatattaaccaaggtcaccccagttatcggaggagcaaacaggggctaagtccaccgggggaggctgctggtgaatattaaccaaggtcaccccagttatcggaggagcaaacaggggctaagtccacggtacccactgggaggatgttgagtaagatggaaaactactgatgacccttgcagagacagagtattaggacatgtttgaacaggggccgggcgatcagcaggtagctctagaggatccccgtctgtctgcacatttcgtagagcgagtgttccgatactctaatctccctaggcaaggttcatatttgtgtaggttacttattctccttttgttgactaagtcaataatcagaatcagcaggtttggagtcagcttggcagggatcagcagcctgggttggaaggagggggtataaaagccccttcaccaggagaagccgtcacacagatccacaagctcctgaagaggtaagggtttaagggatggttggttggtggggtattaatgtttaattacctggagcacctgcctgaaatcactttttttcaggttgggtttaaaccgcagccaccatgagcaccgccgtgctggaaaatcctggcttgggcaggaaactctctgactttggacaggtgagccacggcagcctgagctgctcagttaggggaatttgggcctccagagaaagagatccgaagactgctggtgcttcctggtttcataagctcagtaagaagtctgaattcgttggaagctgatgatagaagaaagagttcatgcttgctttgtccatggaggtttaacaggaatgaattgctaaactgtggaaaatgttttaaacaaatgcatcttatcctgtaggaaacaagctatattgaagacaactgcaatcaaaacggcgccatcagcctgatcttcagcctgaaagaagaagtgggcgccctggccaaggtgctgagactgttcgaagagaacgacgtgaacctgacacacatcgagagcagacccagcagactgaagaaggacgagtacgagttcttcacccacctggacaagcggagcctgcctgctctgaccaacatcatcaagatcctgcggcacgacatcggcgccacagtgcacgaactgagccgggacaagaaaaaggacaccgtgccatggttccccagaaccatccaagagctggacagattcgccaaccagatcctgagctatggcgccgagctggacgctgatcaccctggctttaaggaccccgtgtaccgggccagaagaaagcagtttgccgatatcgcctacaactaccggcacggccagcctattcctcgggtcgagtacatggaagaggaaaagaaaacctggggcaccgtgttcaagaccctgaagtccctgtacaagacccacgcctgctacgagtacaaccacatcttcccactgctcgaaaagtactgcggcttccacgaggacaatatccctcagcttgaggacgtgtcccagttcctgcagacctgcaccggctttagactgaggccagttgccggactgctgagcagcagagattttctcggcggcctggccttcagagtgttccactgtacccagtacatcagacacggcagcaagcccatgtacacccctgagcctgatatctgccacgagctgctgggacatgtgcccctgttcagcgatagaagcttcgcccagttcagccaagagatcggactggcttctctgggagcccctgacgagtacattgagaagctggccaccatctactggttcaccgtggaattcggcctgtgcaagcagggcgacagcatcaaagcttatggcgctggcctgctgtctagcttcggcgagctgcagtactgtctgagcgagaagcctaagctgctgcccctggaactggaaaagaccgccatccagaactacaccgtgaccgagttccagcctctgtactacgtggccgagagcttcaacgacgccaaagaaaaagtgcggaacttcgccgccaccattcctcggcctttcagcgtcagatacgacccctacacacagcggatcgaggtgctggacaacacacagcagctgaaaattctggccgactccatcaacagcgagatcggcatcctgtgcagcgccctgcagaaaatcaagtgatagttaattaagagcatcttaccgccatttattcccatatttgttctgtttttcttgatttgggtatacatttaaatgttaataaaacaaaatggtggggcaatcatttacatttttagggatatgtaattactagttcaggtgtattgccacaagacaaacatgttaagaaactttcccgttatttacgctctgttcctgttaatcaacctctggattacaaaatttgtgaaagattgactgatattcttaactatgttgctccttttacgctgtgtggatatgctgctttatagcctctgtatctagctattgcttcccgtacggctttcgttttctcctccttgtataaatcctggttgctgtctcttttagaggagttgtggcccgttgtccgtcaacgtggcgtggtgtgctctgtgtttgctgacgcaacccccactggctggggcattgccaccacctgtcaactcctttctgggactttcgctttccccctcccgatcgccacggcagaactcatcgccgcctgccttgcccgctgctggacaggggctaggttgctgggcactgataattccgtggtgttgtctgtgccttctagttgccagccatctgttgtttgcccctcccccgtgccttccttgaccctggaaggtgccactcccactgtcctttcctaataaaatgaggaaattgcatcgcattgtctgagtaggtgtcattctattctggggggtggggtggggcaggacagcaagggggaggattgggaagacaatagcaggcatgctggggatgcggtgggctctatggctctagagcatggctacgtagataagtagcatggcgggttaatcattaactacacctgcaggaggaacccctagtgatggagttggccactccctctctgcgcgctcgctcgctcactgaggccgggcgaccaaaggtcgcccgacgcccgggcggcctcagtgagcgagcgagcgcgcagctgcctgcagg

SEQ ID NO: 201 - DNA, 3840 bp, Artificial Sequence
  Description of Artificial Sequence: Synthetic polynucleotide
cctgcaggcagctgcgcgctcgctcgctcactgaggccgcccgggcaaagcccgggcgtcgggcgacctttggtcgcccggcctcagtgagcgagcgagcgcgcagagagggagtggccaactccatcactaggggttccttgtagttaatgattaacccgccatgctacttatcgcggccgcaggctcagaggcacacaggagtttctgggctcaccctgcccccttccaacccctcagttcccatcctccagcagctgtttgtgtgctgcctctgaagtccacactgaacaaacttcagcctactcatgtccctaaaatgggcaaacattgcaagcagcaaacagcaaacacacagccctccctgcctgctgaccttggagctggggcagaggtcagagacctctctgggcccatgccacctccaacatccacttgaccccttggaatttcagtggagaggagcagaggttgtcctggtgtggtttaggtagtgtgagagggtccaggttcaaaaccacttgctgggtggggagttgtcagtaagtggctatgccccaaccctgaagcctgtttccccatctgtacaatggaaatgataaagacccccatctgatagggtttttgtggcaaataaacatttggtttttttgttttgttttgttttgttttttgagatggaggtttgctctgtggcccaggctggagtgcagtgacacaatctcatctcaccacaaccttcccctgcctcagcctcccaagtagctgggattacaagcatgtgccaccacacctggctaattttctatttttagtagagatgggtttctccatgttggtcagcctcagcctcccaagtaactgggattacaggcctgtgccaccacacctggctaattttttctatttttgacagggatggggtttcaccatgttggtcaggctggtctagaggtactggatcttgctaccagtggaacagccactaaggattctgcagtgagagcagagggccagctaagtggtactctcccagagactgtctgactcatgccaccccctccaccttggacacaggacactgtggtttctgagccaggtacaatgactccttttggtaagtgcagtggaagctgtacactgcccaggcaaagtgtctgggcagcataggcaggtgactcagatcccagccagtggacttagcccctgtttgctcctctgataactggggtgaccttggttaatattcaccagcagcctcccctgttgcccctctggatccactgcttaaatacagacaaggacagggccctgtctcctcagcttcaggcaccaccactgacctgggacagtgaataattactctaaggtaaatataaaatttttaagtgtataatgtgttaaactactgattctaattgtttctctcttttagattccaacctttggaactgagtttaaaccgcagccaccatgagcaccgccgtgctggaaaatcctggcctgggcagaaagctgagcgacttcggccaagagacaagctacatcgaggacaactgcaaccagaacggcgccatcagcctgatcttcagcctgaaagaagaagtgggcgccctggccaaggtgctgagactgttcgaagagaacgacgtgaacctgacacacatcgagagcagacccagcagactgaagaaggacgagtacgagttcttcacccacctggacaagcggagcctgcctgctctgaccaacatcatcaagatcctgcggcacgacatcggcgccacagtgcacgaactgagccgggacaagaaaaaggacaccgtgccatggttccccagaaccatccaagagctggacagattcgccaaccagatcctgagctatggcgccgagctggacgctgatcaccctggctttaaggaccccgtgtaccgggccagaagaaagcagtttgccgatatcgcctacaactaccggcacggccagcctattcctcgggtcgagtacatggaagaggaaaagaaaacctggggcaccgtgttcaagaccctgaagtccctgtacaagacccacgcctgctacgagtacaaccacatcttcccactgctcgaaaagtactgcggcttccacgaggacaatatccctcagcttgaggacgtgtcccagttcctgcagacctgcaccggctttagactgaggccagttgccggactgctgagcagcagagattttctcggcggcctggccttcagagtgttccactgtacccagtacatcagacacggcagcaagcccatgtacacccctgagcctgatatctgccacgagctgctgggacatgtgcccctgttcagcgatagaagcttcgcccagttcagccaagagatcggactggcttctctgggagcccctgacgagtacattgagaagctggccaccatctactggttcaccgtggaattcggcctgtgcaagcagggcgacagcatcaaagcttatggcgctggcctgctgtctagcttcggcgagctgcagtactgtctgagcgagaagcctaagctgctgcccctggaactggaaaagaccgccatccagaactacaccgtgaccgagttccagcctctgtactacgtggccgagagcttcaacgacgccaaagaaaaagtgcggaacttcgccgccaccattcctcggcctttcagcgtcagatacgacccctacacacagcggatcgaggtgctggacaacacacagcagctgaaaattctggccgactccatcaacagcgagatcggcatcctgtgcagcgccctgcagaaaatcaagtgatagttaattaagagcatcttaccgccatttattcccatatttgttctgtttttcttgatttgggtatacatttaaatgttaataaaacaaaatggtggggcaatcatttacatttttagggatatgtaattactagttcaggtgtattgccacaagacaaacatgttaagaaactttcccgttatttacgctctgttcctgttaatcaacctctggattacaaaatttgtgaaagattgactgatattcttaactatgttgctccttttacgctgtgtggatatgctgctttatagcctctgtatctagctattgcttcccgtacggctttcgttttctcctccttgtataaatcctggttgctgtctcttttagaggagttgtggcccgttgtccgtcaacgtggcgtggtgtgctctgtgtttgctgacgcaacccccactggctggggcattgccaccacctgtcaactcctttctgggactttcgctttccccctcccgatcgccacggcagaactcatcgccgcctgccttgcccgctgctggacaggggctaggttgctgggcactgataattccgtggtgttgtctgtgccttctagttgccagccatctgttgtttgcccctcccccgtgccttccttgaccctggaaggtgccactcccactgtcctttcctaataaaatgaggaaattgcatcgcattgtctgagtaggtgtcattctattctggggggtggggtggggcaggacagcaagggggaggattgggaagacaatagcaggcatgctggggatgcggtgggctctatggctctagagcatggctacgtagataagtagcatggcgggttaatcattaactacacctgcaggaggaacccctagtgatggagttggccactccctctctgcgcgctcgctcgctcactgaggccgggcgaccaaaggtcgcccgacgcccgggcggcctcagtgagcgagcgagcgcgcagctgcctgcagg

SEQ ID NO: 202 - DNA, 2778 bp, Artificial Sequence
  Description of Artificial Sequence: Synthetic polynucleotide
cctgcaggcagctgcgcgctcgctcgctcactgaggccgcccgggcaaagcccgggcgtcgggcgacctttggtcgcccggcctcagtgagcgagcgagcgcgcagagagggagtggccaactccatcactaggggttccttgtagttaatgattaacccgccatgctacttatcgcggccgccgggggaggctgctggtgaatattaaccaaggtcaccccagttatcggaggagcaaacaggggctaagtccacacgcgtggtaccgtctgtctgcacatttcgtagagcgagtgttccgatactctaatctccctaggcaaggttcatatttgtgtaggttacttattctccttttgttgactaagtcaataatcagaatcagcaggtttggagtcagcttggcagggatcagcagcctgggttggaaggagggggtataaaagccccttcaccaggagaagccgtcacacagatccacaagctcctgaagaggtaagggtttaagggatggttggttggtggggtattaatgtttaattacctggagcacctgcctgaaatcactttttttcaggttggtttaaaccgcagccaccatgagcaccgccgtgctggaaaatcctggcctgggcagaaagctgagcgacttcggccaagagacaagctacatcgaggacaactgcaaccagaacggcgccatcagcctgatcttcagcctgaaagaagaagtgggcgccctggccaaggtgctgagactgttcgaagagaacgacgtgaacctgacacacatcgagagcagacccagcagactgaagaaggacgagtacgagttcttcacccacctggacaagcggagcctgcctgctctgaccaacatcatcaagatcctgcggcacgacatcggcgccacagtgcacgaactgagccgggacaagaaaaaggacaccgtgccatggttccccagaaccatccaagagctggacagattcgccaaccagatcctgagctatggcgccgagctggacgctgatcaccctggctttaaggaccccgtgtaccgggccagaagaaagcagtttgccgatatcgcctacaactaccggcacggccagcctattcctcgggtcgagtacatggaagaggaaaagaaaacctggggcaccgtgttcaagaccctgaagtccctgtacaagacccacgcctgctacgagtacaaccacatcttcccactgctcgaaaagtactgcggcttccacgaggacaatatccctcagcttgaggacgtgtcccagttcctgcagacctgcaccggctttagactgaggccagttgccggactgctgagcagcagagattttctcggcggcctggccttcagagtgttccactgtacccagtacatcagacacggcagcaagcccatgtacacccctgagcctgatatctgccacgagctgctgggacatgtgcccctgttcagcgatagaagcttcgcccagttcagccaagagatcggactggcttctctgggagcccctgacgagtacattgagaagctggccaccatctactggttcaccgtggaattcggcctgtgcaagcagggcgacagcatcaaagcttatggcgctggcctgctgtctagcttcggcgagctgcagtactgtctgagcgagaagcctaagctgctgcccctggaactggaaaagaccgccatccagaactacaccgtgaccgagttccagcctctgtactacgtggccgagagcttcaacgacgccaaagaaaaagtgcggaacttcgccgccaccattcctcggcctttcagcgtcagatacgacccctacacacagcggatcgaggtgctggacaacacacagcagctgaaaattctggccgactccatcaacagcgagatcggcatcctgtgcagcgccctgcagaaaatcaagtgatagttaattaagctcgctttcttgctgtccaatttctattaaaggttcctttgttccctaagtccaactactaaactgggggatattatgaagggccttgagcatctggattctgcctaataaaaaacatttattttcattgcaatgatgtatttaaattatttctgaatattttactaaaaagggaatgtgggaggtcagtgcatttaaaacataaagaaatgaagagctagttcaaaccttgggaaaatacactatatcttaaactccatgaaagaaggtgaggctgcaaacagctaatgcacattggcaacagcccctgatgcctatgccttattcatccctcagaaaaggattcaagtagaggcttgatttggaggttaaagttttgctatgctgtattttacagacatgataagatacattgatgagtttggacaaaccacaactagaatgcagtgaaaaaaatgctttatttgtgaaatttgtgatgctattgctttatttgtaaccattataagctgcaataaacaagttaacaacaacaattgcattcattttatgtttcaggttcagggggagatgtgggaggttttttaaagcaagtaaaacctctacaaatgtggtatctagagcatggctacgtagataagtagcatggcgggttaatcattaactacacctgcaggaggaacccctagtgatggagttggccactccctctctgcgcgctcgctcgctcactgaggccgggcgaccaaaggtcgcccgacgcccgggcggcctcagtgagcgagcgagcgcgcagctgcctgcagg

SEQ ID NO: 203 - DNA, 2490 bp, Artificial Sequence
  Description of Artificial Sequence: Synthetic polynucleotide
cctgcaggcagctgcgcgctcgctcgctcactgaggccgcccgggcaaagcccgggcgtcgggcgacctttggtcgcccggcctcagtgagcgagcgagcgcgcagagagggagtggccaactccatcactaggggttccttgtagttaatgattaacccgccatgctacttatcgcggccgccgggggaggctgctggtgaatattaaccaaggtcaccccagttatcggaggagcaaacaggggctaagtccacacgcgtggtaccgtctgtctgcacatttcgtagagcgagtgttccgatactctaatctccctaggcaaggttcatatttgtgtaggttacttattctccttttgttgactaagtcaataatcagaatcagcaggtttggagtcagcttggcagggatcagcagcctgggttggaaggagggggtataaaagccccttcaccaggagaagccgtcacacagatccacaagctcctgaagaggtaagggtttaagggatggttggttggtggggtattaatgtttaattacctggagcacctgcctgaaatcactttttttcaggttggtttaaaccgcagccaccatgagcaccgccgtgctggaaaatcctggcctgggcagaaagctgagcgacttcggccaagagacaagctacatcgaggacaactgcaaccagaacggcgccatcagcctgatcttcagcctgaaagaagaagtgggcgccctggccaaggtgctgagactgttcgaagagaacgacgtgaacctgacacacatcgagagcagacccagcagactgaagaaggacgagtacgagttcttcacccacctggacaagcggagcctgcctgctctgaccaacatcatcaagatcctgcggcacgacatcggcgccacagtgcacgaactgagccgggacaagaaaaaggacaccgtgccatggttccccagaaccatccaagagctggacagattcgccaaccagatcctgagctatggcgccgagctggacgctgatcaccctggctttaaggaccccgtgtaccgggccagaagaaagcagtttgccgatatcgcctacaactaccggcacggccagcctattcctcgggtcgagtacatggaagaggaaaagaaaacctggggcaccgtgttcaagaccctgaagtccctgtacaagacccacgcctgctacgagtacaaccacatcttcccactgctcgaaaagtactgcggcttccacgaggacaatatccctcagcttgaggacgtgtcccagttcctgcagacctgcaccggctttagactgaggccagttgccggactgctgagcagcagagattttctcggcggcctggccttcagagtgttccactgtacccagtacatcagacacggcagcaagcccatgtacacccctgagcctgatatctgccacgagctgctgggacatgtgcccctgttcagcgatagaagcttcgcccagttcagccaagagatcggactggcttctctgggagcccctgacgagtacattgagaagctggccaccatctactggttcaccgtggaattcggcctgtgcaagcagggcgacagcatcaaagcttatggcgctggcctgctgtctagcttcggcgagctgcagtactgtctgagcgagaagcctaagctgctgcccctggaactggaaaagaccgccatccagaactacaccgtgaccgagttccagcctctgtactacgtggccgagagcttcaacgacgccaaagaaaaagtgcggaacttcgccgccaccattcctcggcctttcagcgtcagatacgacccctacacacagcggatcgaggtgctggacaacacacagcagctgaaaattctggccgactccatcaacagcgagatcggcatcctgtgcagcgccctgcagaaaatcaagtgatagttaattaagctcgctttcttgctgtccaatttctattaaaggttcctttgttccctaagtccaactactaaactgggggatattatgaagggccttgagcatctggattctgcctcagacatgataagatacattgatgagtttggacaaaccacaactagaatgcagtgaaaaaaatgctttatttgtgaaatttgtgatgctattgctttatttgtaaccattataagctgcaataaacaagttaacaacaacaattgcattcattttatgtttcaggttcagggggagatgtgggaggttttttaaagcaagtaaaacctctacaaatgtggtatctagagcatggctacgtagataagtagcatggcgggttaatcattaactacacctgcaggaggaacccctagtgatggagttggccactccctctctgcgcgctcgctcgctcactgaggccgggcgaccaaaggtcgcccgacgcccgggcggcctcagtgagcgagcgagcgcgcagctgcctgcagg

SEQ ID NO: 204 - DNA, 2964 bp, Artificial Sequence
  Description of Artificial Sequence: Synthetic polynucleotide
cctgcaggcagctgcgcgctcgctcgctcactgaggccgcccgggcaaagcccgggcgtcgggcgacctttggtcgcccggcctcagtgagcgagcgagcgcgcagagagggagtggccaactccatcactaggggttccttgtagttaatgattaacccgccatgctacttatcgcggccgccgggggaggctgctggtgaatattaaccaaggtcaccccagttatcggaggagcaaacaggggctaagtccacacgcgtggtaccgtctgtctgcacatttcgtagagcgagtgttccgatactctaatctccctaggcaaggttcatatttgtgtaggttacttattctccttttgttgactaagtcaataatcagaatcagcaggtttggagtcagcttggcagggatcagcagcctgggttggaaggagggggtataaaagccccttcaccaggagaagccgtcacacagatccacaagctcctgaagaggtaagggtttaagggatggttggttggtggggtattaatgtttaattacctggagcacctgcctgaaatcactttttttcaggttggtttaaaccgcagccaccatgagcaccgccgtgctggaaaatcctggcctgggcagaaagctgagcgacttcggccaagagacaagctacatcgaggacaactgcaaccagaacggcgccatcagcctgatcttcagcctgaaagaagaagtgggcgccctggccaaggtgctgagactgttcgaagagaacgacgtgaacctgacacacatcgagagcagacccagcagactgaagaaggacgagtacgagttcttcacccacctggacaagcggagcctgcctgctctgaccaacatcatcaagatcctgcggcacgacatcggcgccacagtgcacgaactgagccgggacaagaaaaaggacaccgtgccatggttccccagaaccatccaagagctggacagattcgccaaccagatcctgagctatggcgccgagctggacgctgatcaccctggctttaaggaccccgtgtaccgggccagaagaaagcagtttgccgatatcgcctacaactaccggcacggccagcctattcctcgggtcgagtacatggaagaggaaaagaaaacctggggcaccgtgttcaagaccctgaagtccctgtacaagacccacgcctgctacgagtacaaccacatcttcccactgctcgaaaagtactgcggcttccacgaggacaatatccctcagcttgaggacgtgtcccagttcctgcagacctgcaccggctttagactgaggccagttgccggactgctgagcagcagagattttctcggcggcctggccttcagagtgttccactgtacccagtacatcagacacggcagcaagcccatgtacacccctgagcctgatatctgccacgagctgctgggacatgtgcccctgttcagcgatagaagcttcgcccagttcagccaagagatcggactggcttctctgggagcccctgacgagtacattgagaagctggccaccatctactggttcaccgtggaattcggcctgtgcaagcagggcgacagcatcaaagcttatggcgctggcctgctgtctagcttcggcgagctgcagtactgtctgagcgagaagcctaagctgctgcccctggaactggaaaagaccgccatccagaactacaccgtgaccgagttccagcctctgtactacgtggccgagagcttcaacgacgccaaagaaaaagtgcggaacttcgccgccaccattcctcggcctttcagcgtcagatacgacccctacacacagcggatcgaggtgctggacaacacacagcagctgaaaattctggccgactccatcaacagcgagatcggcatcctgtgcagcgccctgcagaaaatcaagtgatagttaattaagagcatcttaccgccatttattcccatatttgttctgtttttcttgatttgggtatacatttaaatgttaataaaacaaaatggtggggcaatcatttacatttttagggatatgtaattactagttcaggtgtattgccacaagacaaacatgttaagaaactttcccgttatttacgctctgttcctgttaatcaacctctggattacaaaatttgtgaaagattgactgatattcttaactatgttgctccttttacgctgtgtggatatgctgctttatagcctctgtatctagctattgcttcccgtacggctttcgttttctcctccttgtataaatcctggttgctgtctcttttagaggagttgtggcccgttgtccgtcaacgtggcgtggtgtgctctgtgtttgctgacgcaacccccactggctggggcattgccaccacctgtcaactcctttctgggactttcgctttccccctcccgatcgccacggcagaactcatcgccgcctgccttgcccgctgctggacaggggctaggttgctgggcactgataattccgtggtgttgtccagacatgataagatacattgatgagtttggacaaaccacaactagaatgcagtgaaaaaaatgctttatttgtgaaatttgtgatgctattgctttatttgtaaccattataagctgcaataaacaagttaacaacaacaattgcattcattttatgtttcaggttcagggggagatgtgggaggttttttaaagcaagtaaaacctctacaaatgtggtatctagagcatggctacgtagataagtagcatggcgggttaatcattaactacacctgcaggaggaacccctagtgatggagttggccactccctctctgcgcgctcgctcgctcactgaggccgggcgaccaaaggtcgcccgacgcccgggcggcctcagtgagcgagcgagcgcgcagctgcctgcagg

SEQ ID NO: 205 - DNA, 3137 bp, Artificial Sequence
  Description of Artificial Sequence: Synthetic polynucleotide
cctgcaggcagctgcgcgctcgctcgctcactgaggccgcccgggcaaagcccgggcgtcgggcgacctttggtcgcccggcctcagtgagcgagcgagcgcgcagagagggagtggccaactccatcactaggggttccttgtagttaatgattaacccgccatgctacttatcgcggccgccgggggaggctgctggtgaatattaaccaaggtcaccccagttatcggaggagcaaacaggggctaagtccacacgcgtggtaccgtctgtctgcacatttcgtagagcgagtgttccgatactctaatctccctaggcaaggttcatatttgtgtaggttacttattctccttttgttgactaagtcaataatcagaatcagcaggtttggagtcagcttggcagggatcagcagcctgggttggaaggagggggtataaaagccccttcaccaggagaagccgtcacacagatccacaagctcctgaagaggtaagggtttaagggatggttggttggtggggtattaatgtttaattacctggagcacctgcctgaaatcactttttttcaggttggtttaaaccgcagccaccatgagcaccgccgtgctggaaaatcctggcctgggcagaaagctgagcgacttcggccaagagacaagctacatcgaggacaactgcaaccagaacggcgccatcagcctgatcttcagcctgaaagaagaagtgggcgccctggccaaggtgctgagactgttcgaagagaacgacgtgaacctgacacacatcgagagcagacccagcagactgaagaaggacgagtacgagttcttcacccacctggacaagcggagcctgcctgctctgaccaacatcatcaagatcctgcggcacgacatcggcgccacagtgcacgaactgagccgggacaagaaaaaggacaccgtgccatggttccccagaaccatccaagagctggacagattcgccaaccagatcctgagctatggcgccgagctggacgctgatcaccctggctttaaggaccccgtgtaccgggccagaagaaagcagtttgccgatatcgcctacaactaccggcacggccagcctattcctcgggtcgagtacatggaagaggaaaagaaaacctggggcaccgtgttcaagaccctgaagtccctgtacaagacccacgcctgctacgagtacaaccacatcttcccactgctcgaaaagtactgcggcttccacgaggacaatatccctcagcttgaggacgtgtcccagttcctgcagacctgcaccggctttagactgaggccagttgccggactgctgagcagcagagattttctcggcggcctggccttcagagtgttccactgtacccagtacatcagacacggcagcaagcccatgtacacccctgagcctgatatctgccacgagctgctgggacatgtgcccctgttcagcgatagaagcttcgcccagttcagccaagagatcggactggcttctctgggagcccctgacgagtacattgagaagctggccaccatctactggttcaccgtggaattcggcctgtgcaagcagggcgacagcatcaaagcttatggcgctggcctgctgtctagcttcggcgagctgcagtactgtctgagcgagaagcctaagctgctgcccctggaactggaaaagaccgccatccagaactacaccgtgaccgagttccagcctctgtactacgtggccgagagcttcaacgacgccaaagaaaaagtgcggaacttcgccgccaccattcctcggcctttcagcgtcagatacgacccctacacacagcggatcgaggtgctggacaacacacagcagctgaaaattctggccgactccatcaacagcgagatcggcatcctgtgcagcgccctgcagaaaatcaagtgatagttaattaagagcatcttaccgccatttattcccatatttgttctgtttttcttgatttgggtatacatttaaatgttaataaaacaaaatggtggggcaatcatttacatttttagggatatgtaattactagttcaggtgtattgccacaagacaaacatgttaagaaactttcccgttatttacgctctgttcctgttaatcaacctctggattacaaaatttgtgaaagattgactgatattcttaactatgttgctccttttacgctgtgtggatatgctgctttatagcctctgtatctagctattgcttcccgtacggctttcgttttctcctccttgtataaatcctggttgctgtctcttttagaggagttgtggcccgttgtccgtcaacgtggcgtggtgtgctctgtgtttgctgacgcaacccccactggctggggcattgccaccacctgtcaactcctttctgggactttcgctttccccctcccgatcgccacggcagaactcatcgccgcctgccttgcccgctgctggacaggggctaggttgctgggcactgataattccgtggtgttgtcgctcgctttcttgctgtccaatttctattaaaggttcctttgttccctaagtccaactactaaactgggggatattatgaagggccttgagcatctggattctgcctaataaaaaacatttattttcattgcaatgatgtatttaaattatttctgaatattttactaaaaagggaatgtgggaggtcagtgcatttaaaacataaagaaatgaagagctagttcaaaccttgggaaaatacactatatcttaaactccatgaaagaaggtgaggctgcaaacagctaatgcacattggcaacagcccctgatgcctatgccttattcatccctcagaaaaggattcaagtagaggcttgatttggaggttaaagttttgctatgctgtattttatctagagcatggctacgtagataagtagcatggcgggttaatcattaactacacctgcaggaggaacccctagtgatggagttggccactccctctctgcgcgctcgctcgctcactgaggccgggcgaccaaaggtcgcccgacgcccgggcggcctcagtgagcgagcgagcgcgcagctgcctgcagg

SEQ ID NO: 206 - DNA, 3117 bp, Artificial Sequence
  Description of Artificial Sequence: Synthetic polynucleotide
cctgcaggcagctgcgcgctcgctcgctcactgaggccgcccgggcaaagcccgggcgtcgggcgacctttggtcgcccggcctcagtgagcgagcgagcgcgcagagagggagtggccaactccatcactaggggttccttgtagttaatgattaacccgccatgctacttatcgcggccgcgttaatcattaacgcttgtactttggtacagttaatcattaacgcttgtactttggtacagttaatcattaacgcttgtactttggtacaatcgatgcgagaacttgtgcctccccgtgttcctgctctttgtccctctgtcctacttagactaatatttgccttgggtactgcaaacaggaaatgggggagggacaggagtagggcggagggtagttaagaatgtggatccccgtctgtctgcacatttcgtagagcgagtgttccgatactctaatctccctaggcaaggttcatatttgtgtaggttacttattctccttttgttgactaagtcaataatcagaatcagcaggtttggagtcagcttggcagggatcagcagcctgggttggaaggagggggtataaaagccccttcaccaggagaagccgtcacacagatccacaagctcctgaagaggtaagggtttaagggatggttggttggtggggtattaatgtttaattacctggagcacctgcctgaaatcactttttttcaggttgggtttaaaccgcagccaccatgagcaccgccgtgctggaaaatcctggcctgggcagaaagctgagcgacttcggccaagagacaagctacatcgaggacaactgcaaccagaacggcgccatcagcctgatcttcagcctgaaagaagaagtgggcgccctggccaaggtgctgagactgttcgaagagaacgacgtgaacctgacacacatcgagagcagacccagcagactgaagaaggacgagtacgagttcttcacccacctggacaagcggagcctgcctgctctgaccaacatcatcaagatcctgcggcacgacatcggcgccacagtgcacgaactgagccgggacaagaaaaaggacaccgtgccatggttccccagaaccatccaagagctggacagattcgccaaccagatcctgagctatggcgccgagctggacgctgatcaccctggctttaaggaccccgtgtaccgggccagaagaaagcagtttgccgatatcgcctacaactaccggcacggccagcctattcctcgggtcgagtacatggaagaggaaaagaaaacctggggcaccgtgttcaagaccctgaagtccctgtacaagacccacgcctgctacgagtacaaccacatcttcccactgctcgaaaagtactgcggcttccacgaggacaatatccctcagcttgaggacgtgtcccagttcctgcagacctgcaccggctttagactgaggccagttgccggactgctgagcagcagagattttctcggcggcctggccttcagagtgttccactgtacccagtacatcagacacggcagcaagcccatgtacacccctgagcctgatatctgccacgagctgctgggacatgtgcccctgttcagcgatagaagcttcgcccagttcagccaagagatcggactggcttctctgggagcccctgacgagtacattgagaagctggccaccatctactggttcaccgtggaattcggcctgtgcaagcagggcgacagcatcaaagcttatggcgctggcctgctgtctagcttcggcgagctgcagtactgtctgagcgagaagcctaagctgctgcccctggaactggaaaagaccgccatccagaactacaccgtgaccgagttccagcctctgtactacgtggccgagagcttcaacgacgccaaagaaaaagtgcggaacttcgccgccaccattcctcggcctttcagcgtcagatacgacccctacacacagcggatcgaggtgctggacaacacacagcagctgaaaattctggccgactccatcaacagcgagatcggcatcctgtgcagcgccctgcagaaaatcaagtgatagttaattaagagcatcttaccgccatttattcccatatttgttctgtttttcttgatttgggtatacatttaaatgttaataaaacaaaatggtggggcaatcatttacatttttagggatatgtaattactagttcaggtgtattgccacaagacaaacatgttaagaaactttcccgttatttacgctctgttcctgttaatcaacctctggattacaaaatttgtgaaagattgactgatattcttaactatgttgctccttttacgctgtgtggatatgctgctttatagcctctgtatctagctattgcttcccgtacggctttcgttttctcctccttgtataaatcctggttgctgtctcttttagaggagttgtggcccgttgtccgtcaacgtggcgtggtgtgctctgtgtttgctgacgcaacccccactggctggggcattgccaccacctgtcaactcctttctgggactttcgctttccccctcccgatcgccacggcagaactcatcgccgcctgccttgcccgctgctggacaggggctaggttgctgggcactgataattccgtggtgttgtctgtgccttctagttgccagccatctgttgtttgcccctcccccgtgccttccttgaccctggaaggtgccactcccactgtcctttcctaataaaatgaggaaattgcatcgcattgtctgagtaggtgtcattctattctggggggtggggtggggcaggacagcaagggggaggattgggaagacaatagcaggcatgctggggatgcggtgggctctatggctctagagcatggctacgtagataagtagcatggcgggttaatcattaactacacctgcaggaggaacccctagtgatggagttggccactccctctctgcgcgctcgctcgctcactgaggccgggcgaccaaaggtcgcccgacgcccgggcggcctcagtgagcgagcgagcgcgcagctgcctgcagg

SEQ ID NO: 207 - DNA, 3454 bp, Artificial Sequence
  Description of Artificial Sequence: Synthetic polynucleotide
cctgcaggcagctgcgcgctcgctcgctcactgaggccgcccgggcaaagcccgggcgtcgggcgacctttggtcgcccggcctcagtgagcgagcgagcgcgcagagagggagtggccaactccatcactaggggttccttgtagttaatgattaacccgccatgctacttatcgcggccgcgttaatcattaacgcttgtactttggtacagttaatcattaacgcttgtactttggtacagttaatcattaacgcttgtactttggtacaatcgatgcgagaacttgtgcctccccgtgttcctgctctttgtccctctgtcctacttagactaatatttgccttgggtactgcaaacaggaaatgggggagggacaggagtagggcggagggtagttaagaatgtcaattggggggaggctgctggtgaatattaaccaaggtcaccccagttatcggaggagcaaacaggggctaagtccaccgggggaggctgctggtgaatattaaccaaggtcaccccagttatcggaggagcaaacaggggctaagtccaccgggggaggctgctggtgaatattaaccaaggtcaccccagttatcggaggagcaaacaggggctaagtccacggtacccactgggaggatgttgagtaagatggaaaactactgatgacccttgcagagacagagtattaggacatgtttgaacaggggccgggcgatcagcaggtagcactagaggatccccgtctgtctgcacatttcgtagagcgagtgttccgatactctaatctccctaggcaaggttcatatttgtgtaggttacttattctccttttgttgactaagtcaataatcagaatcagcaggtttggagtcagcttggcagggatcagcagcctgggttggaaggagggggtataaaagccccttcaccaggagaagccgtcacacagatccacaagctcctgaagaggtaagggtttaagggatggttggttggtggggtattaatgtttaattacctggagcacctgcctgaaatcactttttttcaggttgggtttaaaccgcagccaccatgagcaccgccgtgctggaaaatcctggcctgggcagaaagctgagcgacttcggccaagagacaagctacatcgaggacaactgcaaccagaacggcgccatcagcctgatcttcagcctgaaagaagaagtgggcgccctggccaaggtgctgagactgttcgaagagaacgacgtgaacctgacacacatcgagagcagacccagcagactgaagaaggacgagtacgagttcttcacccacctggacaagcggagcctgcctgctctgaccaacatcatcaagatcctgcggcacgacatcggcgccacagtgcacgaactgagccgggacaagaaaaaggacaccgtgccatggttccccagaaccatccaagagctggacagattcgccaaccagatcctgagctatggcgccgagctggacgctgatcaccctggctttaaggaccccgtgtaccgggccagaagaaagcagtttgccgatatcgcctacaactaccggcacggccagcctattcctcgggtcgagtacatggaagaggaaaagaaaacctggggcaccgtgttcaagaccctgaagtccctgtacaagacccacgcctgctacgagtacaaccacatcttcccactgctcgaaaagtactgcggcttccacgaggacaatatccctcagcttgaggacgtgtcccagttcctgcagacctgcaccggctttagactgaggccagttgccggactgctgagcagcagagattttctcggcggcctggccttcagagtgttccactgtacccagtacatcagacacggcagcaagcccatgtacacccctgagcctgatatctgccacgagctgctgggacatgtgcccctgttcagcgatagaagcttcgcccagttcagccaagagatcggactggcttctctgggagcccctgacgagtacattgagaagctggccaccatctactggttcaccgtggaattcggcctgtgcaagcagggcgacagcatcaaagcttatggcgctggcctgctgtctagcttcggcgagctgcagtactgtctgagcgagaagcctaagctgctgcccctggaactggaaaagaccgccatccagaactacaccgtgaccgagttccagcctctgtactacgtggccgagagcttcaacgacgccaaagaaaaagtgcggaacttcgccgccaccattcctcggcctttcagcgtcagatacgacccctacacacagcggatcgaggtgctggacaacacacagcagctgaaaattctggccgactccatcaacagcgagatcggcatcctgtgcagcgccctgcagaaaatcaagtgatagttaattaagagcatcttaccgccatttattcccatatttgttctgtttttcttgatttgggtatacatttaaatgttaataaaacaaaatggtggggcaatcatttacatttttagggatatgtaattactagttcaggtgtattgccacaagacaaacatgttaagaaactttcccgttatttacgctctgttcctgttaatcaacctctggattacaaaatttgtgaaagattgactgatattcttaactatgttgctccttttacgctgtgtggatatgctgctttatagcctctgtatctagctattgcttcccgtacggctttcgttttctcctccttgtataaatcctggttgctgtctcttttagaggagttgtggcccgttgtccgtcaacgtggcgtggtgtgctctgtgtttgctgacgcaacccccactggctggggcattgccaccacctgtcaactcctttctgggactttcgctttccccctcccgatcgccacggcagaactcatcgccgcctgccttgcccgctgctggacaggggctaggttgctgggcactgataattccgtggtgttgtctgtgccttctagttgccagccatctgttgtttgcccctcccccgtgccttccttgaccctggaaggtgccactcccactgtcctttcctaataaaatgaggaaattgcatcgcattgtctgagtaggtgtcattctattctggggggtggggtggggcaggacagcaagggggaggattgggaagacaatagcaggcatgctggggatgcggtgggctctatggctctagagcatggctacgtagataagtagcatggcgggttaatcattaactacacctgcaggaggaacccctagtgatggagttggccactccctctctgcgcgctcgctcgctcactgaggccgggcgaccaaaggtcgcccgacgcccgggcggcctcagtgagcgagcgagcgcgcagctgcctgcagg

SEQ ID NO: 208 - DNA, 3112 bp, Artificial Sequence
  Description of Artificial Sequence: Synthetic polynucleotide
cctgcaggcagctgcgcgctcgctcgctcactgaggccgcccgggcaaagcccgggcgtcgggcgacctttggtcgcccggcctcagtgagcgagcgagcgcgcagagagggagtggccaactccatcactaggggttccttgtagttaatgattaacccgccatgctacttatcgcggccgcaacaggttagtttgactagcgttaatcattaacgttaatcattaacgttaatcattaacgttaatcattaacgttaatcattaacatcgatgcgagaacttgtgcctccccgtgttcctgctctttgtccctctgtcctacttagactaatatttgccttgggtactgcaaacaggaaatgggggagggacaggagtagggcggagggtagttaagaatgtggatccccgtctgtctgcacatttcgtagagcgagtgttccgatactctaatctccctaggcaaggttcatatttgtgtaggttacttattctccttttgttgactaagtcaataatcagaatcagcaggtttggagtcagcttggcagggatcagcagcctgggttggaaggagggggtataaaagccccttcaccaggagaagccgtcacacagatccacaagctcctgaagaggtaagggtttaagggatggttggttggtggggtattaatgtttaattacctggagcacctgcctgaaatcactttttttcaggttgggtttaaaccgcagccaccatgagcaccgccgtgctggaaaatcctggcctgggcagaaagctgagcgacttcggccaagagacaagctacatcgaggacaactgcaaccagaacggcgccatcagcctgatcttcagcctgaaagaagaagtgggcgccctggccaaggtgctgagactgttcgaagagaacgacgtgaacctgacacacatcgagagcagacccagcagactgaagaaggacgagtacgagttcttcacccacctggacaagcggagcctgcctgctctgaccaacatcatcaagatcctgcggcacgacatcggcgccacagtgcacgaactgagccgggacaagaaaaaggacaccgtgccatggttccccagaaccatccaagagctggacagattcgccaaccagatcctgagctatggcgccgagctggacgctgatcaccctggctttaaggaccccgtgtaccgggccagaagaaagcagtttgccgatatcgcctacaactaccggcacggccagcctattcctcgggtcgagtacatggaagaggaaaagaaaacctggggcaccgtgttcaagaccctgaagtccctgtacaagacccacgcctgctacgagtacaaccacatcttcccactgctcgaaaagtactgcggcttccacgaggacaatatccctcagcttgaggacgtgtcccagttcctgcagacctgcaccggctttagactgaggccagttgccggactgctgagcagcagagattttctcggcggcctggccttcagagtgttccactgtacccagtacatcagacacggcagcaagcccatgtacacccctgagcctgatatctgccacgagctgctgggacatgtgcccctgttcagcgatagaagcttcgcccagttcagccaagagatcggactggcttctctgggagcccctgacgagtacattgagaagctggccaccatctactggttcaccgtggaattcggcctgtgcaagcagggcgacagcatcaaagcttatggcgctggcctgctgtctagcttcggcgagctgcagtactgtctgagcgagaagcctaagctgctgcccctggaactggaaaagaccgccatccagaactacaccgtgaccgagttccagcctctgtactacgtggccgagagcttcaacgacgccaaagaaaaagtgcggaacttcgccgccaccattcctcggcctttcagcgtcagatacgacccctacacacagcggatcgaggtgctggacaacacacagcagctgaaaattctggccgactccatcaacagcgagatcggcatcctgtgcagcgccctgcagaaaatcaagtgatagttaattaagagcatcttaccgccatttattcccatatttgttctgtttttcttgatttgggtatacatttaaatgttaataaaacaaaatggtggggcaatcatttacatttttagggatatgtaattactagttcaggtgtattgccacaagacaaacatgttaagaaactttcccgttatttacgctctgttcctgttaatcaacctctggattacaaaatttgtgaaagattgactgatattcttaactatgttgctccttttacgctgtgtggatatgctgctttatagcctctgtatctagctattgcttcccgtacggctttcgttttctcctccttgtataaatcctggttgctgtctcttttagaggagttgtggcccgttgtccgtcaacgtggcgtggtgtgctctgtgtttgctgacgcaacccccactggctggggcattgccaccacctgtcaactcctttctgggactttcgctttccccctcccgatcgccacggcagaactcatcgccgcctgccttgcccgctgctggacaggggctaggttgctgggcactgataattccgtggtgttgtctgtgccttctagttgccagccatctgttgtttgcccctcccccgtgccttccttgaccctggaaggtgccactcccactgtcctttcctaataaaatgaggaaattgcatcgcattgtctgagtaggtgtcattctattctggggggtggggtggggcaggacagcaagggggaggattgggaagacaatagcaggcatgctggggatgcggtgggctctatggctctagagcatggctacgtagataagtagcatggcgggttaatcattaactacacctgcaggaggaacccctagtgatggagttggccactccctctctgcgcgctcgctcgctcactgaggccgggcgaccaaaggtcgcccgacgcccgggcggcctcagtgagcgagcgagcgcgcagctgcctgcagg

SEQ ID NO: 209 - DNA, 3449 bp, Artificial Sequence
  Description of Artificial Sequence: Synthetic polynucleotide
cctgcaggcagctgcgcgctcgctcgctcactgaggccgcccgggcaaagcccgggcgtcgggcgacctttggtcgcccggcctcagtgagcgagcgagcgcgcagagagggagtggccaactccatcactaggggttccttgtagttaatgattaacccgccatgctacttatcgcggccgcaacaggttagtttgactagcgttaatcattaacgttaatcattaacgttaatcattaacgttaatcattaacgttaatcattaacatcgatgcgagaacttgtgcctccccgtgttcctgctctttgtccctctgtcctacttagactaatatttgccttgggtactgcaaacaggaaatgggggagggacaggagtagggcggagggtagttaagaatgtcaattggggggaggctgctggtgaatattaaccaaggtcaccccagttatcggaggagcaaacaggggctaagtccaccgggggaggctgctggtgaatattaaccaaggtcaccccagttatcggaggagcaaacaggggctaagtccaccgggggaggctgctggtgaatattaaccaaggtcaccccagttatcggaggagcaaacaggggctaagtccacggtacccactgggaggatgttgagtaagatggaaaactactgatgacccttgcagagacagagtattaggacatgtttgaacaggggccgggcgatcagcaggtagcactagaggatccccgtctgtctgcacatttcgtagagcgagtgttccgatactctaatctccctaggcaaggttcatatttgtgtaggttacttattctccttttgttgactaagtcaataatcagaatcagcaggtttggagtcagcttggcagggatcagcagcctgggttggaaggagggggtataaaagccccttcaccaggagaagccgtcacacagatccacaagctcctgaagaggtaagggtttaagggatggttggttggtggggtattaatgtttaattacctggagcacctgcctgaaatcactttttttcaggttgggtttaaaccgcagccaccatgagcaccgccgtgctggaaaatcctggcctgggcagaaagctgagcgacttcggccaagagacaagctacatcgaggacaactgcaaccagaacggcgccatcagcctgatcttcagcctgaaagaagaagtgggcgccctggccaaggtgctgagactgttcgaagagaacgacgtgaacctgacacacatcgagagcagacccagcagactgaagaaggacgagtacgagttcttcacccacctggacaagcggagcctgcctgctctgaccaacatcatcaagatcctgcggcacgacatcggcgccacagtgcacgaactgagccgggacaagaaaaaggacaccgtgccatggttccccagaaccatccaagagctggacagattcgccaaccagatcctgagctatggcgccgagctggacgctgatcaccctggctttaaggaccccgtgtaccgggccagaagaaagcagtttgccgatatcgcctacaactaccggcacggccagcctattcctcgggtcgagtacatggaagaggaaaagaaaacctggggcaccgtgttcaagaccctgaagtccctgtacaagacccacgcctgctacgagtacaaccacatcttcccactgctcgaaaagtactgcggcttccacgaggacaatatccctcagcttgaggacgtgtcccagttcctgcagacctgcaccggctttagactgaggccagttgccggactgctgagcagcagagattttctcggcggcctggccttcagagtgttccactgtacccagtacatcagacacggcagcaagcccatgtacacccctgagcctgatatctgccacgagctgctgggacatgtgcccctgttcagcgatagaagcttcgcccagttcagccaagagatcggactggcttctctgggagcccctgacgagtacattgagaagctggccaccatctactggttcaccgtggaattcggcctgtgcaagcagggcgacagcatcaaagcttatggcgctggcctgctgtctagcttcggcgagctgcagtactgtctgagcgagaagcctaagctgctgcccctggaactggaaaagaccgccatccagaactacaccgtgaccgagttccagcctctgtactacgtggccgagagcttcaacgacgccaaagaaaaagtgcggaacttcgccgccaccattcctcggcctttcagcgtcagatacgacccctacacacagcggatcgaggtgctggacaacacacagcagctgaaaattctggccgactccatcaacagcgagatcggcatcctgtgcagcgccctgcagaaaatcaagtgatagttaattaagagcatcttaccgccatttattcccatatttgttctgtttttcttgatttgggtatacatttaaatgttaataaaacaaaatggtggggcaatcatttacatttttagggatatgtaattactagttcaggtgtattgccacaagacaaacatgttaagaaactttcccgttatttacgctctgttcctgttaatcaacctctggattacaaaatttgtgaaagattgactgatattcttaactatgttgctccttttacgctgtgtggatatgctgctttatagcctctgtatctagctattgcttcccgtacggctttcgttttctcctccttgtataaatcctggttgctgtctcttttagaggagttgtggcccgttgtccgtcaacgtggcgtggtgtgctctgtgtttgctgacgcaacccccactggctggggcattgccaccacctgtcaactcctttctgggactttcgctttccccctcccgatcgccacggcagaactcatcgccgcctgccttgcccgctgctggacaggggctaggttgctgggcactgataattccgtggtgttgtctgtgccttctagttgccagccatctgttgtttgcccctcccccgtgccttccttgaccctggaaggtgccactcccactgtcctttcctaataaaatgaggaaattgcatcgcattgtctgagtaggtgtcattctattctggggggtggggtggggcaggacagcaagggggaggattgggaagacaatagcaggcatgctggggatgcggtgggctctatggctctagagcatggctacgtagataagtagcatggcgggttaatcattaactacacctgcaggaggaacccctagtgatggagttggccactccctctctgcgcgctcgctcgctcactgaggccgggcgaccaaaggtcgcccgacgcccgggcggcctcagtgagcgagcgagcgcgcagctgcctgcagg

SEQ ID NO: 210 - DNA, 3222 bp, Artificial Sequence
  Description of Artificial Sequence: Synthetic polynucleotide
cctgcaggcagctgcgcgctcgctcgctcactgaggccgcccgggcaaagcccgggcgtcgggcgacctttggtcgcccggcctcagtgagcgagcgagcgcgcagagagggagtggccaactccatcactaggggttccttgtagttaatgattaacccgccatgctacttatcgcggccgcgggggaggctgctggtgaatattaaccaaggtcaccccagttatcggaggagcaaacaggggctaagtccaccgggggaggctgctggtgaatattaaccaaggtcaccccagttatcggaggagcaaacaggggctaagtccaccgggggaggctgctggtgaatattaaccaaggtcaccccagttatcggaggagcaaacaggggctaagtccacggtacccactgggaggatgttgagtaagatggaaaactactgatgacccttgcagagacagagtattaggacatgtttgaacaggggccgggcgatcagcaggtagcactagaggatccccgtctgtctgcacatttcgtagagcgagtgttccgatactctaatctccctaggcaaggttcatatttgtgtaggttacttattctccttttgttgactaagtcaataatcagaatcagcaggtttggagtcagcttggcagggatcagcagcctgggttggaaggagggggtataaaagccccttcaccaggagaagccgtcacacagatccacaagctcctgaagaggtaagggtttaagggatggttggttggtggggtattaatgtttaattacctggagcacctgcctgaaatcactttttttcaggttgggtttaaaccgcagccaccatgagcaccgccgtgctggaaaatcctggcctgggcagaaagctgagcgacttcggccaagagacaagctacatcgaggacaactgcaaccagaacggcgccatcagcctgatcttcagcctgaaagaagaagtgggcgccctggccaaggtgctgagactgttcgaagagaacgacgtgaacctgacacacatcgagagcagacccagcagactgaagaaggacgagtacgagttcttcacccacctggacaagcggagcctgcctgctctgaccaacatcatcaagatcctgcggcacgacatcggcgccacagtgcacgaactgagccgggacaagaaaaaggacaccgtgccatggttccccagaaccatccaagagctggacagattcgccaaccagatcctgagctatggcgccgagctggacgctgatcaccctggctttaaggaccccgtgtaccgggccagaagaaagcagtttgccgatatcgcctacaactaccggcacggccagcctattcctcgggtcgagtacatggaagaggaaaagaaaacctggggcaccgtgttcaagaccctgaagtccctgtacaagacccacgcctgctacgagtacaaccacatcttcccactgctcgaaaagtactgcggcttccacgaggacaatatccctcagcttgaggacgtgtcccagttcctgcagacctgcaccggctttagactgaggccagttgccggactgctgagcagcagagattttctcggcggcctggccttcagagtgttccactgtacccagtacatcagacacggcagcaagcccatgtacacccctgagcctgatatctgccacgagctgctgggacatgtgcccctgttcagcgatagaagcttcgcccagttcagccaagagatcggactggcttctctgggagcccctgacgagtacattgagaagctggccaccatctactggttcaccgtggaattcggcctgtgcaagcagggcgacagcatcaaagcttatggcgctggcctgctgtctagcttcggcgagctgcagtactgtctgagcgagaagcctaagctgctgcccctggaactggaaaagaccgccatccagaactacaccgtgaccgagttccagcctctgtactacgtggccgagagcttcaacgacgccaaagaaaaagtgcggaacttcgccgccaccattcctcggcctttcagcgtcagatacgacccctacacacagcggatcgaggtgctggacaacacacagcagctgaaaattctggccgactccatcaacagcgagatcggcatcctgtgcagcgccctgcagaaaatcaagtgatagttaattaagagcatcttaccgccatttattcccatatttgttctgtttttcttgatttgggtatacatttaaatgttaataaaacaaaatggtggggcaatcatttacatttttagggatatgtaattactagttcaggtgtattgccacaagacaaacatgttaagaaactttcccgttatttacgctctgttcctgttaatcaacctctggattacaaaatttgtgaaagattgactgatattcttaactatgttgctccttttacgctgtgtggatatgctgctttatagcctctgtatctagctattgcttcccgtacggctttcgttttctcctccttgtataaatcctggttgctgtctcttttagaggagttgtggcccgttgtccgtcaacgtggcgtggtgtgctctgtgtttgctgacgcaacccccactggctggggcattgccaccacctgtcaactcctttctgggactttcgctttccccctcccgatcgccacggcagaactcatcgccgcctgccttgcccgctgctggacaggggctaggttgctgggcactgataattccgtggtgttgtctgtgccttctagttgccagccatctgttgtttgcccctcccccgtgccttccttgaccctggaaggtgccactcccactgtcctttcctaataaaatgaggaaattgcatcgcattgtctgagtaggtgtcattctattctggggggtggggtggggcaggacagcaagggggaggattgggaagacaatagcaggcatgctggggatgcggtgggctctatggctctagagcatggctacgtagataagtagcatggcgggttaatcattaactacacctgcaggaggaacccctagtgatggagttggccactccctctctgcgcgctcgctcgctcactgaggccgggcgaccaaaggtcgcccgacgcccgggcggcctcagtgagcgagcgagcgcgcagctgcctgcagg

SEQ ID NO: 211 - DNA, 3222 bp, Artificial Sequence; identical to SEQ ID NO: 210
  Description of Artificial Sequence: Synthetic polynucleotide

SEQ ID NO: 212 - DNA, 3220 bp, Artificial Sequence
  Description of Artificial Sequence: Synthetic polynucleotide
cctgcaggcagctgcgcgctcgctcgctcactgaggccgcccgggcaaagcccgggcgtcgggcgacctttggtcgcccggcctcagtgagcgagcgagcgcgcagagagggagtggccaactccatcactaggggttccttgtagttaatgattaacccgccatgctacttatcgcggccgcgggggaggctgctggtgaatattaaccaaggtcaccccagttatcggaggagcaaacaggggctaagtccaccgggggaggctgctggtgaatattaaccaaggtcaccccagttatcggaggagcaaacaggggctaagtccaccgggggaggctgctggtgaatattaaccaaggtcaccccagttatcggaggagcaaacaggggctaagtccacggtacccactgggaggatgttgagtaagatggaaaactactgatgacccttgcagagacagagtattaggacatgtttgaacaggggccgggcgatcagcaggtagcactagaggatccccgtctgtctgcacatttcgtagagcgagtgttccgatactctaatctccctaggcaaggttcatatttgtgtaggttacttattctccttttgttgactaagtcaataatcagaatcagcaggtttggagtcagcttggcagggatcagcagcctgggttggaaggagggggtataaaagccccttcaccaggagaagccgtcacacagatccacaagctcctaagaggtaagggtttaagggatggttggttggtggggtattaatgtttaattacctggagcacctgcctgaaatcactttttttcaggttggtttaaaccgcagccaccatgagtacagcagtgttagagaatccaggcctaggtagaaagctgtctgactttggccaggagacctcctacattgaggacaactgcaaccagaatggagccatcagcctgatcttcagcctgaaggaggaggtgggagccctggccaaggtgctgagactgtttgaggagaatgatgtgaacctgacccacattgagtccagaccctccagactgaagaaggatgagtatgagttcttcacccacctggacaagagatccctgcctgctctgaccaacatcatcaagatcctgagacatgatattggagccacagtgcatgagctgagcagggacaagaagaaggacacagtgccttggttccccagaaccatccaggagctggacaggtttgccaaccagatcctgtcctatggagctgagctggatgctgaccaccctggatttaaggatcctgtgtacagggccagaaggaagcagtttgctgacattgcctacaactacaggcatggccagcccatccccagggtggagtacatggaggaggagaagaagacctggggcactgtgttcaagaccctgaagagcctgtacaagacccatgcctgctatgagtacaaccacatcttccccctgctggagaagtactgtggcttccatgaggacaacatccctcagctggaggatgtgtcccagttcctgcagacctgcacaggcttcagactgagacctgtggctggcctgctgtctagcagagacttcctgggaggcctggccttcagagtgttccactgcacccagtacatcagacatggaagcaagcccatgtacacccctgagccagacatctgccatgagctgctgggccatgtgcccctgttctctgatagatcctttgcccagttcagccaggagattggcctggccagcctgggagcccctgatgagtacattgagaagctggccaccatctactggttcacagtggagtttggcctgtgcaagcagggagactccatcaaggcctatggagctggactgctgtcctcctttggagagctgcagtactgcctgtctgagaagcccaagctgctgcccctggagctggagaagacagccatccagaactacacagtgacagagttccagcccctgtactatgtggctgagagcttcaatgatgccaaggagaaggtgagaaactttgctgccaccatccccagacccttctctgtgaggtatgacccctacacccagaggattgaggtgctggacaacacccagcagctgaagatcctggctgactccatcaactctgagattggcatcctgtgctctgccctgcagaagatcaagtaaaccttaattaagagcatcttaccgccatttattcccatatttgttctgtttttcttgatttgggtatacatttaaatgttaataaaacaaaatggtggggcaatcatttacatttttagggatatgtaattactagttcaggtgtattgccacaagacaaacatgttaagaaactttcccgttatttacgctctgttcctgttaatcaacctctggattacaaaatttgtgaaagattgactgatattcttaactatgttgctccttttacgctgtgtggatatgctgctttatagcctctgtatctagctattgcttcccgtacggctttcgttttctcctccttgtataaatcctggttgctgtctcttttagaggagttgtggcccgttgtccgtcaacgtggcgtggtgtgctctgtgtttgctgacgcaacccccactggctggggcattgccaccacctgtcaactcctttctgggactttcgctttccccctcccgatcgccacggcagaactcatcgccgcctgccttgcccgctgctggacaggggctaggttgctgggcactgataattccgtggtgttgtctgtgccttctagttgccagccatctgttgtttgcccctcccccgtgccttccttgaccctggaaggtgccactcccactgtcctttcctaataaaatgaggaaattgcatcgcattgtctgagtaggtgtcattctattctggggggtggggtggggcaggacagcaagggggaggattgggaagacaatagcaggcatgctggggatgcggtgggctctatggctctagagcatggctacgtagataagtagcatggcgggttaatcattaactacacctgcaggaggaacccctagtgatggagttggccactccctctctgcgcgctcgctcgctcactgaggccgggcgaccaaaggtcgcccgacgcccgggcggcctcagtgagcgagcgagcgcgcagctgcctgcagg

SEQ ID NO: 213 - DNA, 3220 bp, Artificial Sequence
  Description of Artificial Sequence: Synthetic polynucleotide
cctgcaggcagctgcgcgctcgctcgctcactgaggccgcccgggcaaagcccgggcgtcgggcgacctttggtcgcccggcctcagtgagcgagcgagcgcgcagagagggagtggccaactccatcactaggggttccttgtagttaatgattaacccgccatgctacttatcgcggccgcgggggaggctgctggtgaatattaaccaaggtcaccccagttatcggaggagcaaacaggggctaagtccaccgggggaggctgctggtgaatattaaccaaggtcaccccagttatcggaggagcaaacaggggctaagtccaccgggggaggctgctggtgaatattaaccaaggtcaccccagttatcggaggagcaaacaggggctaagtccacggtacccactgggaggatgttgagtaagatggaaaactactgatgacccttgcagagacagagtattaggacatgtttgaacaggggccgggcgatcagcaggtagcactagaggatccccgtctgtctgcacatttcgtagagcgagtgttccgatactctaatctccctaggcaaggttcatatttgtgtaggttacttattctccttttgttgactaagtcaataatcagaatcagcaggtttggagtcagcttggcagggatcagcagcctgggttggaaggagggggtataaaagccccttcaccaggagaagccgtcacacagatccacaagctcctaagaggtaagggtttaagggatggttggttggtggggtattaatgtttaattacctggagcacctgcctgaaatcactttttttcaggttggtttaaaccgcagccaccatgtccacagctgtgctggagaaccctggcctgggcagaaagctgtctgactttggccaggagacctcctacattgaggacaactgcaaccagaatggagccatctccctgatcttctccctgaaggaggaggtgggagccctggccaaggtgctgagactgtttgaggagaatgatgtgaacctgacccacattgagtccagaccctccagactgaagaaggatgagtatgagttcttcacccacctggacaagagatccctgcctgccctgaccaacatcatcaagatcctgagacatgacattggagccacagtgcatgagctgtccagagacaagaagaaggacacagtgccctggttccccagaaccatccaggagctggacagatttgccaaccagatcctgtcctatggagctgagctggatgctgaccaccctggcttcaaggaccctgtgtacagggccagaagaaagcagtttgctgacattgcctacaactacagacatggccagcccatccccagagtggagtacatggaggaggagaagaagacctggggcacagtgttcaagaccctgaagtccctgtacaagacccatgcctgctatgagtacaaccacatcttccccctgctggagaagtactgtggcttccatgaggacaacatcccccagctggaggatgtgtcccagttcctgcagacctgcacaggcttcagactgagacctgtggctggcctgctgtcctccagagacttcctgggaggcctggccttcagagtgttccactgcacccagtacatcagacatggctccaagcccatgtacacccctgagcctgacatctgccatgagctgctgggccatgtgcccctgttctctgacagatcctttgcccagttctcccaggagattggcctggcctccctgggagcccctgatgagtacattgagaagctggccaccatctactggttcacagtggagtttggcctgtgcaagcagggagactccatcaaggcctatggagctggcctgctgtcctcctttggagagctgcagtactgcctgtctgagaagcccaagctgctgcccctggagctggagaagacagccatccagaactacacagtgacagagttccagcccctgtactatgtggctgagtccttcaatgatgccaaggagaaggtcagaaactttgctgccaccatccccagacccttctctgtgagatatgacccctacacccagagaattgaggtgctggacaacacccagcagctgaagatcctggctgactccatcaactctgagattggcatcctgtgctctgccctgcagaagatcaagtaaaccttaattaagagcatcttaccgccatttattcccatatttgttctgtttttcttgatttgggtatacatttaaatgttaataaaacaaaatggtggggcaatcatttacatttttagggatatgtaattactagttcaggtgtattgccacaagacaaacatgttaagaaactttcccgttatttacgctctgttcctgttaatcaacctctggattacaaaatttgtgaaagattgactgatattcttaactatgttgctccttttacgctgtgtggatatgctgctttatagcctctgtatctagctattgcttcccgtacggctttcgttttctcctccttgtataaatcctggttgctgtctcttttagaggagttgtggcccgttgtccgtcaacgtggcgtggtgtgctctgtgtttgctgacgcaacccccactggctggggcattgccaccacctgtcaactcctttctgggactttcgctttccccctcccgatcgccacggcagaactcatcgccgcctgccttgcccgctgctggacaggggctaggttgctgggcactgataattccgtggtgttgtctgtgccttctagttgccagccatctgttgtttgcccctcccccgtgccttccttgaccctggaaggtgccactcccactgtcctttcctaataaaatgaggaaattgcatcgcattgtctgagtaggtgtcattctattctggggggtggggtggggcaggacagcaagggggaggattgggaagacaatagcaggcatgctggggatgcggtgggctctatggctctagagcatggctacgtagataagtagcatggcgggttaatcattaactacacctgcaggaggaacccctagtgatggagttggccactccctctctgcgcgctcgctcgctcactgaggccgggcgaccaaaggtcgcccgacgcccgggcggcctcagtgagcgagcgagcgcgcagctgcctgcagg

SEQ ID NO: 214-381 - skipped (168 entries)

SEQ ID NO: 382 - DNA, 1359 bp, Artificial Sequence
  Description of Artificial Sequence: Synthetic polynucleotide
atgagcaccgccgtgctggaaaatcctggcctgggcagaaagctgagcgacttcggccaagagacaagctacatcgaggacaactgcaaccagaacggcgccatcagcctgatcttcagcctgaaagaagaagtgggcgccctggccaaggtgctgagactgttcgaagagaacgacgtgaacctgacacacatcgagagcagacccagcagactgaagaaggacgagtacgagttcttcacccacctggacaagcggagcctgcctgctctgaccaacatcatcaagatcctgcggcacgacatcggcgccacagtgcacgaactgagccgggacaagaaaaaggacaccgtgccatggttccccagaaccatccaagagctggacagattcgccaaccagatcctgagctatggcgccgagctggacgctgatcaccctggctttaaggaccccgtgtaccgggccagaagaaagcagtttgccgatatcgcctacaactaccggcacggccagcctattcctcgggtcgagtacatggaagaggaaaagaaaacctggggcaccgtgttcaagaccctgaagtccctgtacaagacccacgcctgctacgagtacaaccacatcttcccactgctcgaaaagtactgcggcttccacgaggacaatatccctcagcttgaggacgtgtcccagttcctgcagacctgcaccggctttagactgaggccagttgccggactgctgagcagcagagattttctcggcggcctggccttcagagtgttccactgtacccagtacatcagacacggcagcaagcccatgtacacccctgagcctgatatctgccacgagctgctgggacatgtgcccctgttcagcgatagaagcttcgcccagttcagccaagagatcggactggcttctctgggagcccctgacgagtacattgagaagctggccaccatctactggttcaccgtggaattcggcctgtgcaagcagggcgacagcatcaaagcttatggcgctggcctgctgtctagcttcggcgagctgcagtactgtctgagcgagaagcctaagctgctgcccctggaactggaaaagaccgccatccagaactacaccgtgaccgagttccagcctctgtactacgtggccgagagcttcaacgacgccaaagaaaaagtgcggaacttcgccgccaccattcctcggcctttcagcgtcagatacgacccctacacacagcggatcgaggtgctggacaacacacagcagctgaaaattctggccgactccatcaacagcgagatcggcatcctgtgcagcgccctgcagaaaatcaagtga

SEQ ID NO: 383 - DNA, 1363 bp, Homo sapiens
atgtccactgcggtcctggaaaacccaggcttgggcaggaaactctctgactttggacaggaaacaagctatattgaagacaactgcaatcaaaatggtgccatatcactgatcttctcactcaaagaagaagttggtgcattggccaaagtattgcgcttatttgaggagaatgatgtaaacctgacccacattgaatctagaccttctcgtttaaagaaagatgagtatgaatttttcacccatttggataaacgtagcctgcctgctctgacaaacatcatcaagatcttgaggcatgacattggtgccactgtccatgagctttcacgagataagaagaaagacacagtgccctggttcccaagaaccattcaagagctggacagatttgccaatcagattctcagctatggagcggaactggatgctgaccaccctggttttaaagatcctgtgtaccgtgcaagacggaagcagtttgctgacattgcctacaactaccgccatgggcagcccatccctcgagtggaatacatggaggaagaaaagaaaacatggggcacagtgttcaagactctgaagtccttgtataaaacccatgcttgctatgagtacaatcacatttttccacttcttgaaaagtactgtggcttccatgaagataacattccccagctggaagacgtttctcagttcctgcagacttgcactggtttccgcctccgacctgtggctggcctgctttcctctcgggatttcttgggtggcctggccttccgagtcttccactgcacacagtacatcagacatggatccaagcccatgtatacccccgaacctgacatctgccatgagctgttgggacatgtgcccttgttttcagatcgcagctttgcccagttttcccaggaaattggccttgcctctctgggtgcacctgatgaatacattgaaaagctcgccacaatttactggtttactgtggagtttgggctctgcaaacaaggagactccataaaggcatatggtgctgggctcctgtcatcctttggtgaattacagtactgcttatcagagaagccaaagcttctccccctggagctggagaagacagccatccaaaattacactgtcacggagttccagcccctctattacgtggcagagagttttaatgatgccaaggagaaagtaaggaactttgctgccacaatacctcggcccttctcagttcgctacgacccatacacccaaaggattgaggtcttggacaatacccagcagcttaagattttggctgattccattaacagtgaaattggaatcctttgcagtgccctccagaaaataaagtaattaa

SEQ ID NO: 384 - DNA, 3359 bp, Artificial Sequence
  Description of Artificial Sequence: Synthetic polynucleotide
atgagcaccgccgtgctggaaaatcctggcttgggcaggaaactctctgactttggacaggtgagccagggcagcctgagctgctcagttaggggaatttgggcctccagagaaagagatcccaagactgctggtgcttcctggtttcataagctcagtaagaagtctgaattggttggaagctgatgagaatatccaggaagtcaacagacaaatgtcctcaacaattgtttctaagtaggagaacatctgtcctgggtggctttcacaggaatgaatgaccattgctttagggggttggggatctggcctccagaactgccaccaattagctgtgtgtctttggacaagttactgtccctctctgttgtctgtttactcttctgtacactgaaggggctggtccctaatgatctgggatgggatgtggaatccttctagatttcttttgtaatatttataaagtgctctcagcaaggtatcaaaatggcaaaattgtgagtaactatcctcctttcattttgggaagaagatgaggcatgaagagaattcagacagaaacttactcagaccaggggaggcagaaactaagcagagaggaaaatgaccaagagttagccctgggcatggaatgtgaaagaaccctaaaggtgacttggaaataatgcccaaggtatattccattctcctggatttgttggcattttcttgaggtgaagaattgcagaatacattctttaatgtgacctacatatttacccatgtgaggaagtctgctcctggactcttgagattcagtcataaagcccaggccagggaaataatgtaagtctgcaggcccctgtcatcagtaggattagggagaagagttctcagtagaaaacagggaggctggagagaaaagaatggttaatgttaaggttaatataactagaaagactgcagaacttaggactgatttttatttgaatccttaaaaaaaaaaatttcttatgaaaatagtacatggctcttaggagacagaacttattgtacagaggaacagtgtgagagtcagagtgaattttatgtattatttttggacttaggctaatgatttagcaaactctggaatgtcagccctaaccccaaccttggttttctgtcacatgcatgtagtaagtgctagatcctggacattctttgagatttagtttaagactaagtttattttctgataggttatttgtgtactttcatggattttgtaactctttttcaacaattggatgtctcagatctcagcatatgggagcaagttaatgcttcctgagatctttgccaaaggtcaagaggtcatttttgtgtatttataattttccatcatttttatatacttctcaatattctttttaaactattcttttccttttttcatcctctgaatactgttttgacagatcttgttattagcatgctttcagggatgagaaaactaagaaagctgaatgatttgcccaaagtagtccacctggaaaatgaaagagagaggattccaatccaggtcttaggattcaaaagcctgtgcatgttccatttttagtactttccacactgtatttctcaatgtctttctgggacattttataaatcatattatatcacctctaaggatctttcagtttgttatatatgtgtctattaagttagattgtgagctcctaaaagataaagcattgtcttattcatctttaaatttctcagagcccaaatagtgcctggaacctagtagttgctcaataaaaggtattgaatttacaggattgaatggtgacatcaatgaataattgaagattccttaagctgataactgacccagtagcatcattgatcatttaattgccctggacttacttattttccaccacactacatatttctgtatagaatatatatagctcattgtattgcaagatttaactagaagaaagagttcatgcttgctttgtccatgtaggtttaacaggaatgaattgctaaactgtggaaaatgttttaaacaaatgcatcttatcctgtaggaaacaagctatattgaagacaactgcaatcaaaacggcgccatcagcctgatcttcagcctgaaagaagaagtgggcgccctggccaaggtgctgagactgttcgaagagaacgacgtgaacctgacacacatcgagagcagacccagcagactgaagaaggacgagtacgagttcttcacccacctggacaagcggagcctgcctgctctgaccaacatcatcaagatcctgcggcacgacatcggcgccacagtgcacgaactgagccgggacaagaaaaaggacaccgtgccatggttccccagaaccatccaagagctggacagattcgccaaccagatcctgagctatggcgccgagctggacgctgatcaccctggctttaaggaccccgtgtaccgggccagaagaaagcagtttgccgatatcgcctacaactaccggcacggccagcctattcctcgggtcgagtacatggaagaggaaaagaaaacctggggcaccgtgttcaagaccctgaagtccctgtacaagacccacgcctgctacgagtacaaccacatcttcccactgctcgaaaagtactgcggcttccacgaggacaatatccctcagcttgaggacgtgtcccagttcctgcagacctgcaccggctttagactgaggccagttgccggactgctgagcagcagagattttctcggcggcctggccttcagagtgttccactgtacccagtacatcagacacggcagcaagcccatgtacacccctgagcctgatatctgccacgagctgctgggacatgtgcccctgttcagcgatagaagcttcgcccagttcagccaagagatcggactggcttctctgggagcccctgacgagtacattgagaagctggccaccatctactggttcaccgtggaattcggcctgtgcaagcagggcgacagcatcaaagcttatggcgctggcctgctgtctagcttcggcgagctgcagtactgtctgagcgagaagcctaagctgctgcccctggaactggaaaagaccgccatccagaactacaccgtgaccgagttccagcctctgtactacgtggccgagagcttcaacgacgccaaagaaaaagtgcggaacttcgccgccaccattcctcggcctttcagcgtcagatacgacccctacacacagcggatcgaggtgctggacaacacacagcagctgaaaattctggccgactccatcaacagcgagatcggcatcctgtgcagcgccctgcagaaaatcaagtga

SEQ ID NO: 385 - DNA, 2226 bp, Artificial Sequence
  Description of Artificial Sequence: Synthetic polynucleotide
atgagcaccgccgtgctggaaaatcctggcttgggcaggaaactctctgactttggacaggtgagccagggcagcctgagctgctcagttaggggaatttgggcctccagagaaagagatcccaagactgctggtgcttcctggtttcataagctcagtaagaagtctgaattggttggaagctgatgagaatatccaggaagtcaacagacaaatgtcctcaacaattgtttctaagtaggagaacatctgtcctgggtggctttcacaggaatgaatgaccattgctttagggggttggggatctggcctccagaactgccaccaattagctgtgtgtctttggacaagttactgtccctctctgttgtctgtttactcttctgtacactgaaggggttccaatccaggtcttaggattcaaaagcctgtgcatgttccatttttagtactttccacactgtatttctcaatgtctttctgggacattttataaatcatattatatcacctctaaggatctttcagtttgttatatatgtgtctattaagttagattgtgagctcctaaaagataaagcattgtcttattcatctttaaatttctcagagcccaaatagtgcctggaacctagtagttgctcaataaaaggtattgaatttacaggattgaatggtgacatcaatgaataattgaagattccttaagctgataactgacccagtagcatcattgatcatttaattgccctggacttacttattttccaccacactacatatttctgtatagaatatatatagctcattgtattgcaagatttaactagaagaaagagttcatgcttgctttgtccatgtaggtttaacaggaatgaattgctaaactgtggaaaatgttttaaacaaatgcatcttatcctgtaggaaacaagctatattgaagacaactgcaatcaaaacggcgccatcagcctgatcttcagcctgaaagaagaagtgggcgccctggccaaggtgctgagactgttcgaagagaacgacgtgaacctgacacacatcgagagcagacccagcagactgaagaaggacgagtacgagttcttcacccacctggacaagcggagcctgcctgctctgaccaacatcatcaagatcctgcggcacgacatcggcgccacagtgcacgaactgagccgggacaagaaaaaggacaccgtgccatggttccccagaaccatccaagagctggacagattcgccaaccagatcctgagctatggcgccgagctggacgctgatcaccctggctttaaggaccccgtgtaccgggccagaagaaagcagtttgccgatatcgcctacaactaccggcacggccagcctattcctcgggtcgagtacatggaagaggaaaagaaaacctggggcaccgtgttcaagaccctgaagtccctgtacaagacccacgcctgctacgagtacaaccacatcttcccactgctcgaaaagtactgcggcttccacgaggacaatatccctcagcttgaggacgtgtcccagttcctgcagacctgcaccggctttagactgaggccagttgccggactgctgagcagcagagattttctcggcggcctggccttcagagtgttccactgtacccagtacatcagacacggcagcaagcccatgtacacccctgagcctgatatctgccacgagctgctgggacatgtgcccctgttcagcgatagaagcttcgcccagttcagccaagagatcggactggcttctctgggagcccctgacgagtacattgagaagctggccaccatctactggttcaccgtggaattcggcctgtgcaagcagggcgacagcatcaaagcttatggcgctggcctgctgtctagcttcggcgagctgcagtactgtctgagcgagaagcctaagctgctgcccctggaactggaaaagaccgccatccagaactacaccgtgaccgagttccagcctctgtactacgtggccgagagcttcaacgacgccaaagaaaaagtgcggaacttcgccgccaccattcctcggcctttcagcgtcagatacgacccctacacacagcggatcgaggtgctggacaacacacagcagctgaaaattctggccgactccatcaacagcgagatcggcatcctgtgcagcgccctgcagaaaatcaagtga

SEQ ID NO: 386 - DNA, 2179 bp, Artificial Sequence
  Description of Artificial Sequence: Synthetic polynucleotide
atgagcaccgccgtgctggaaaatcctggcctgggcagaaagctgagcgacttcggccaggtaagcctgttgggcttccactgctaggagagaattggttccccacatgtgaaagcagtctgggaaatgctggtatttccagtctcctaaggctactaagaaatatgactttatttagaggcgaggaaaatgcccaggaagtcaactgatgagtctagtcttaacaagttgaggatacagaaagttggggatctgagctgctaccaacatctgtgtgtctttgggtggctcattggtatcctctgcctattggctttatcttctgtacactgaaaggaaatggctggtccttagtcacctacccaggtcttggatccatagcctacggatgtcccatttttattgctttttatattttgtctcccagtgtctttttgaggattttttttttttttttgcatcacttgctcttcctctaagaatctcctgacttcttgtacatgtgtctgatggtcagaattttagcactgaagtatgggcgtatttatcataattcaggtttatatcctttcagatatgggctagggtctggtattagggtgctcattaaaaaatgttgatttttgtcagtgtctagtgacatcaatgcataatttaaggttctataaattgaaagctaacccaggagtgactcatcctctcattgttttcaacttacttatttctgatcacactgacttccctgtggaatacacgtggttcactgtgttccaaagcttaacgagcagaaaaaggttatgctcgtctcttcttgagaggttttaagagaataattgctaagctgtgaaaaacattttaaccaagtgatctaattatgtaggagacaagctacatcgaggacaactgcaaccagaacggcgccatcagcctgatcttcagcctgaaagaagaagtgggcgccctggccaaggtgctgagactgttcgaagagaacgacgtgaacctgacacacatcgagagcagacccagcagactgaagaaggacgagtacgagttcttcacccacctggacaagcggagcctgcctgctctgaccaacatcatcaagatcctgcggcacgacatcggcgccacagtgcacgaactgagccgggacaagaaaaaggacaccgtgccatggttccccagaaccatccaagagctggacagattcgccaaccagatcctgagctatggcgccgagctggacgctgatcaccctggctttaaggaccccgtgtaccgggccagaagaaagcagtttgccgatatcgcctacaactaccggcacggccagcctattcctcgggtcgagtacatggaagaggaaaagaaaacctggggcaccgtgttcaagaccctgaagtccctgtacaagacccacgcctgctacgagtacaaccacatcttcccactgctcgaaaagtactgcggcttccacgaggacaatatccctcagcttgaggacgtgtcccagttcctgcagacctgcaccggctttagactgaggccagttgccggactgctgagcagcagagattttctcggcggcctggccttcagagtgttccactgtacccagtacatcagacacggcagcaagcccatgtacacccctgagcctgatatctgccacgagctgctgggacatgtgcccctgttcagcgatagaagcttcgcccagttcagccaagagatcggactggcttctctgggagcccctgacgagtacattgagaagctggccaccatctactggttcaccgtggaattcggcctgtgcaagcagggcgacagcatcaaagcttatggcgctggcctgctgtctagcttcggcgagctgcagtactgtctgagcgagaagcctaagctgctgcccctggaactggaaaagaccgccatccagaactacaccgtgaccgagttccagcctctgtactacgtggccgagagcttcaacgacgccaaagaaaaagtgcggaacttcgccgccaccattcctcggcctttcagcgtcagatacgacccctacacacagcggatcgaggtgctggacaacacacagcagctgaaaattctggccgactccatcaacagcgagatcggcatcctgtgcagcgccctgcagaaaatcaagtga

SEQ ID NO: 387 - DNA, 2179 bp, Artificial Sequence
  Description of Artificial Sequence: Synthetic polynucleotide
atgagcaccgccgtgctggaaaatcctggcttgggcaggaaactctctgactttggacaggtaagcctgttgggcttccactgctaggagagaattggttccccacatgtgaaagcagtctgggaaatgctggtatttccagtctcctaaggctactaagaaatatgactttatttagaggcgaggaaaatgcccaggaagtcaactgatgagtctagtcttaacaagttgaggatacagaaagttggggatctgagctgctaccaacatctgtgtgtctttgggtggctcattggtatcctctgcctattggctttatcttctgtacactgaaaggaaatggctggtccttagtcacctacccaggtcttggatccatagcctacggatgtcccatttttattgctttttatattttgtctcccagtgtctttttgaggattttttttttttttttgcatcacttgctcttcctctaagaatctcctgacttcttgtacatgtgtctgatggtcagaattttagcactgaagtatgggcgtatttatcataattcaggtttatatcctttcagatatgggctagggtctggtattagggtgctcattaaaaaatgttgatttttgtcagtgtctagtgacatcaatgcataatttaaggttctataaattgaaagctaacccaggagtgactcatcctctcattgttttcaacttacttatttctgatcacactgacttccctgtggaatacacgtggttcactgtgttccaaagcttaacgagcagaaaaaggttatgctcgtctcttcttgagaggttttaagagaataattgctaagctgtgaaaaacattttaaccaagtgatctaattatgtaggaaacaagctatattgaagacaactgcaatcaaaacggcgccatcagcctgatcttcagcctgaaagaagaagtgggcgccctggccaaggtgctgagactgttcgaagagaacgacgtgaacctgacacacatcgagagcagacccagcagactgaagaaggacgagtacgagttcttcacccacctggacaagcggagcctgcctgctctgaccaacatcatcaagatcctgcggcacgacatcggcgccacagtgcacgaactgagccgggacaagaaaaaggacaccgtgccatggttccccagaaccatccaagagctggacagattcgccaaccagatcctgagctatggcgccgagctggacgctgatcaccctggctttaaggaccccgtgtaccgggccagaagaaagcagtttgccgatatcgcctacaactaccggcacggccagcctattcctcgggtcgagtacatggaagaggaaaagaaaacctggggcaccgtgttcaagaccctgaagtccctgtacaagacccacgcctgctacgagtacaaccacatcttcccactgctcgaaaagtactgcggcttccacgaggacaatatccctcagcttgaggacgtgtcccagttcctgcagacctgcaccggctttagactgaggccagttgccggactgctgagcagcagagattttctcggcggcctggccttcagagtgttccactgtacccagtacatcagacacggcagcaagcccatgtacacccctgagcctgatatctgccacgagctgctgggacatgtgcccctgttcagcgatagaagcttcgcccagttcagccaagagatcggactggcttctctgggagcccctgacgagtacattgagaagctggccaccatctactggttcaccgtggaattcggcctgtgcaagcagggcgacagcatcaaagcttatggcgctggcctgctgtctagcttcggcgagctgcagtactgtctgagcgagaagcctaagctgctgcccctggaactggaaaagaccgccatccagaactacaccgtgaccgagttccagcctctgtactacgtggccgagagcttcaacgacgccaaagaaaaagtgcggaacttcgccgccaccattcctcggcctttcagcgtcagatacgacccctacacacagcggatcgaggtgctggacaacacacagcagctgaaaattctggccgactccatcaacagcgagatcggcatcctgtgcagcgccctgcagaaaatcaagtga

SEQ ID NO: 388 - DNA, 1362 bp, Artificial Sequence
  Description of Artificial Sequence: Synthetic polynucleotide
atgagtaccgccgtgctggaaaaccctggactgggacgcaaactgagtgacttcggacaggaaacatcatacattgaggataattgtaaccagaatggcgccatctctctgatcttcagcctgaaggaagaagtgggcgccctggcaaaggtgctgcgcctgtttgaggagaacgacgtgaatctgacccacatcgagtcccggccttctagactgaagaaggacgagtacgagttctttacccacctggataagcggtccctgccagccctgacaaacatcatcaagatcctgcgccacgacattggagcaacagtgcacgagctgtctagagacaagaagaaggataccgtgccctggttccctcggacaatccaggagctggatagatttgccaaccagatcctgtcttacggcgcagagctggatgcagatcaccctggcttcaaggacccagtgtatcgggcccggagaaagcagtttgccgatatcgcctacaattatagacacggacagccaatccctagagtggagtatatggaggaggagaagaagacctggggcacagtgttcaagaccctgaagagcctgtacaagacacacgcctgctacgagtataaccacatcttccccctgctggagaagtattgtggctttcacgaggacaatatccctcagctggaggacgtgagccagttcctgcagacctgcacaggctttaggctgcgcccagtggcaggactgctgagctccagagacttcctgggaggactggccttcagagtgtttcactgcacccagtacatcaggcacggctccaagccaatgtatacaccagagcccgacatctgtcacgagctgctgggccacgtgcccctgtttagcgatagatccttcgcccagttttcccaggagattggactggcatctctgggagcacctgacgagtacatcgagaagctggccaccatctattggttcacagtggagtttggcctgtgcaagcagggcgatagcatcaaggcctacggcgcaggactgctgtctagcttcggcgagctgcagtattgtctgtccgagaagccaaagctgctgcccctggagctggagaagaccgccatccagaactacaccgtgacagagttccagcccctgtactatgtggccgagtcttttaacgatgccaaggagaaggtgagaaatttcgccgccacaatccctaggcccttcagcgtgcggtacgacccttatacccagaggatcgaggtgctggataatacacagcagctgaagatcctggccgactccatcaatagcgaaatcggcatcctgtgctcagccctgcagaaaatcaaataataa

SEQ ID NO: 389 - DNA, 2226 bp, Artificial Sequence
  Description of Artificial Sequence: Synthetic polynucleotide
atgagcaccgccgtgctggaaaatcctggcctgggcagaaagctgagcgacttcggccaggtgagccagggcagcctgagctgctcagttaggggaatttgggcctccagagaaagagatcccaagactgctggtgcttcctggtttcataagctcagtaagaagtctgaattggttggaagctgatgagaatatccaggaagtcaacagacaaatgtcctcaacaattgtttctaagtaggagaacatctgtcctgggtggctttcacaggaatgaatgaccattgctttagggggttggggatctggcctccagaactgccaccaattagctgtgtgtctttggacaagttactgtccctctctgttgtctgtttactcttctgtacactgaaggggttccaatccaggtcttaggattcaaaagcctgtgcatgttccatttttagtactttccacactgtatttctcaatgtctttctgggacattttataaatcatattatatcacctctaaggatctttcagtttgttatatatgtgtctattaagttagattgtgagctcctaaaagataaagcattgtcttattcatctttaaatttctcagagcccaaatagtgcctggaacctagtagttgctcaataaaaggtattgaatttacaggattgaatggtgacatcaatgaataattgaagattccttaagctgataactgacccagtagcatcattgatcatttaattgccctggacttacttattttccaccacactacatatttctgtatagaatatatatagctcattgtattgcaagatttaactagaagaaagagttcatgcttgctttgtccatgtaggtttaacaggaatgaattgctaaactgtggaaaatgttttaaacaaatgcatcttatcctgtaggagacaagctacatcgaggacaactgcaaccagaacggcgccatcagcctgatcttcagcctgaaagaagaagtgggcgccctggccaaggtgctgagactgttcgaagagaacgacgtgaacctgacacacatcgagagcagacccagcagactgaagaaggacgagtacgagttcttcacccacctggacaagcggagcctgcctgctctgaccaacatcatcaagatcctgcggcacgacatcggcgccacagtgcacgaactgagccgggacaagaaaaaggacaccgtgccatggttccccagaaccatccaagagctggacagattcgccaaccagatcctgagctatggcgccgagctggacgctgatcaccctggctttaaggaccccgtgtaccgggccagaagaaagcagtttgccgatatcgcctacaactaccggcacggccagcctattcctcgggtcgagtacatggaagaggaaaagaaaacctggggcaccgtgttcaagaccctgaagtccctgtacaagacccacgcctgctacgagtacaaccacatcttcccactgctcgaaaagtactgcggcttccacgaggacaatatccctcagcttgaggacgtgtcccagttcctgcagacctgcaccggctttagactgaggccagttgccggactgctgagcagcagagattttctcggcggcctggccttcagagtgttccactgtacccagtacatcagacacggcagcaagcccatgtacacccctgagcctgatatctgccacgagctgctgggacatgtgcccctgttcagcgatagaagcttcgcccagttcagccaagagatcggactggcttctctgggagcccctgacgagtacattgagaagctggccaccatctactggttcaccgtggaattcggcctgtgcaagcagggcgacagcatcaaagcttatggcgctggcctgctgtctagcttcggcgagctgcagtactgtctgagcgagaagcctaagctgctgcccctggaactggaaaagaccgccatccagaactacaccgtgaccgagttccagcctctgtactacgtggccgagagcttcaacgacgccaaagaaaaagtgcggaacttcgccgccaccattcctcggcctttcagcgtcagatacgacccctacacacagcggatcgaggtgctggacaacacacagcagctgaaaattctggccgactccatcaacagcgagatcggcatcctgtgcagcgccctgcagaaaatcaagtga

SEQ ID NO: 390 - DNA, 1359 bp, Artificial Sequence
  Description of Artificial Sequence: Synthetic polynucleotide
atgagcaccgccgtgctggaaaatcctggcttgggcaggaaactctctgactttggacaggaaacaagctatattgaagacaactgcaatcaaaacggcgccatcagcctgatcttcagcctgaaagaagaagtgggcgccctggccaaggtgctgagactgttcgaagagaacgacgtgaacctgacacacatcgagagcagacccagcagactgaagaaggacgagtacgagttcttcacccacctggacaagcggagcctgcctgctctgaccaacatcatcaagatcctgcggcacgacatcggcgccacagtgcacgaactgagccgggacaagaaaaaggacaccgtgccatggttccccagaaccatccaagagctggacagattcgccaaccagatcctgagctatggcgccgagctggacgctgatcaccctggctttaaggaccccgtgtaccgggccagaagaaagcagtttgccgatatcgcctacaactaccggcacggccagcctattcctcgggtcgagtacatggaagaggaaaagaaaacctggggcaccgtgttcaagaccctgaagtccctgtacaagacccacgcctgctacgagtacaaccacatcttcccactgctcgaaaagtactgcggcttccacgaggacaatatccctcagcttgaggacgtgtcccagttcctgcagacctgcaccggctttagactgaggccagttgccggactgctgagcagcagagattttctcggcggcctggccttcagagtgttccactgtacccagtacatcagacacggcagcaagcccatgtacacccctgagcctgatatctgccacgagctgctgggacatgtgcccctgttcagcgatagaagcttcgcccagttcagccaagagatcggactggcttctctgggagcccctgacgagtacattgagaagctggccaccatctactggttcaccgtggaattcggcctgtgcaagcagggcgacagcatcaaagcttatggcgctggcctgctgtctagcttcggcgagctgcagtactgtctgagcgagaagcctaagctgctgcccctggaactggaaaagaccgccatccagaactacaccgtgaccgagttccagcctctgtactacgtggccgagagcttcaacgacgccaaagaaaaagtgcggaacttcgccgccaccattcctcggcctttcagcgtcagatacgacccctacacacagcggatcgaggtgctggacaacacacagcagctgaaaattctggccgactccatcaacagcgagatcggcatcctgtgcagcgccctgcagaaaatcaagtga

SEQ ID NO: 391 - DNA, 1359 bp, Artificial Sequence
  Description of Artificial Sequence: Synthetic polynucleotide
atgagcaccgccgtgctggaaaatcctggcctgggcagaaagctgagcgacttcggccaggagacaagctacatcgaggacaactgcaaccagaacggcgccatcagcctgatcttcagcctgaaagaagaagtgggcgccctggccaaggtgctgagactgttcgaagagaacgacgtgaacctgacacacatcgagagcagacccagcagactgaagaaggacgagtacgagttcttcacccacctggacaagcggagcctgcctgctctgaccaacatcatcaagatcctgcggcacgacatcggcgccacagtgcacgaactgagccgggacaagaaaaaggacaccgtgccatggttccccagaaccatccaagagctggacagattcgccaaccagatcctgagctatggcgccgagctggacgctgatcaccctggctttaaggaccccgtgtaccgggccagaagaaagcagtttgccgatatcgcctacaactaccggcacggccagcctattcctcgggtcgagtacatggaagaggaaaagaaaacctggggcaccgtgttcaagaccctgaagtccctgtacaagacccacgcctgctacgagtacaaccacatcttcccactgctcgaaaagtactgcggcttccacgaggacaatatccctcagcttgaggacgtgtcccagttcctgcagacctgcaccggctttagactgaggccagttgccggactgctgagcagcagagattttctcggcggcctggccttcagagtgttccactgtacccagtacatcagacacggcagcaagcccatgtacacccctgagcctgatatctgccacgagctgctgggacatgtgcccctgttcagcgatagaagcttcgcccagttcagccaagagatcggactggcttctctgggagcccctgacgagtacattgagaagctggccaccatctactggttcaccgtggaattcggcctgtgcaagcagggcgacagcatcaaagcttatggcgctggcctgctgtctagcttcggcgagctgcagtactgtctgagcgagaagcctaagctgctgcccctggaactggaaaagaccgccatccagaactacaccgtgaccgagttccagcctctgtactacgtggccgagagcttcaacgacgccaaagaaaaagtgcggaacttcgccgccaccattcctcggcctttcagcgtcagatacgacccctacacacagcggatcgaggtgctggacaacacacagcagctgaaaattctggccgactccatcaacagcgagatcggcatcctgtgcagcgccctgcagaaaatcaagtga

SEQ ID NO: 392 - DNA, 1588 bp, Artificial Sequence
  Description of Artificial Sequence: Synthetic polynucleotide
atgagcaccgccgtgctggaaaatcctggcttgggcaggaaactctctgactttggacaggtgagccacggcagcctgagctgctcagttaggggaatttgggcctccagagaaagagatccgaagactgctggtgcttcctggtttcataagctcagtaagaagtctgaattcgttggaagctgatgatagaagaaagagttcatgcttgctttgtccatggaggtttaacaggaatgaattgctaaactgtggaaaatgttttaaacaaatgcatcttatcctgtaggaaacaagctatattgaagacaactgcaatcaaaacggcgccatcagcctgatcttcagcctgaaagaagaagtgggcgccctggccaaggtgctgagactgttcgaagagaacgacgtgaacctgacacacatcgagagcagacccagcagactgaagaaggacgagtacgagttcttcacccacctggacaagcggagcctgcctgctctgaccaacatcatcaagatcctgcggcacgacatcggcgccacagtgcacgaactgagccgggacaagaaaaaggacaccgtgccatggttccccagaaccatccaagagctggacagattcgccaaccagatcctgagctatggcgccgagctggacgctgatcaccctggctttaaggaccccgtgtaccgggccagaagaaagcagtttgccgatatcgcctacaactaccggcacggccagcctattcctcgggtcgagtacatggaagaggaaaagaaaacctggggcaccgtgttcaagaccctgaagtccctgtacaagacccacgcctgctacgagtacaaccacatcttcccactgctcgaaaagtactgcggcttccacgaggacaatatccctcagcttgaggacgtgtcccagttcctgcagacctgcaccggctttagactgaggccagttgccggactgctgagcagcagagattttctcggcggcctggccttcagagtgttccactgtacccagtacatcagacacggcagcaagcccatgtacacccctgagcctgatatctgccacgagctgctgggacatgtgcccctgttcagcgatagaagcttcgcccagttcagccaagagatcggactggcttctctgggagcccctgacgagtacattgagaagctggccaccatctactggttcaccgtggaattcggcctgtgcaagcagggcgacagcatcaaagcttatggcgctggcctgctgtctagcttcggcgagctgcagtactgtctgagcgagaagcctaagctgctgcccctggaactggaaaagaccgccatccagaactacaccgtgaccgagttccagcctctgtactacgtggccgagagcttcaacgacgccaaagaaaaagtgcggaacttcgccgccaccattcctcggcctttcagcgtcagatacgacccctacacacagcggatcgaggtgctggacaacacacagcagctgaaaattctggccgactccatcaacagcgagatcggcatcctgtgcagcgccctgcagaaaatcaagtga

SEQ ID NO: 393 - DNA, 1359 bp, Artificial Sequence
  Description of Artificial Sequence: Synthetic polynucleotide
atgagcaccgccgtgctggaaaatcctggcctgggcagaaagctgagcgacttcggccaagagacaagctacatcgaggacaactgcaaccagaacggcgccatcagcctgatcttcagcctgaaagaagaagtgggcgccctggccaaggtgctgagactgttcgaagagaacgacgtgaacctgacacacatcgagagcagacccagcagactgaagaaggacgagtacgagttcttcacccacctggacaagcggagcctgcctgctctgaccaacatcatcaagatcctgcggcacgacatcggcgccacagtgcacgaactgagccgggacaagaaaaaggacaccgtgccatggttccccagaaccatccaagagctggacagattcgccaaccagatcctgagctatggcgccgagctggacgctgatcaccctggctttaaggaccccgtgtaccgggccagaagaaagcagtttgccgatatcgcctacaactaccggcacggccagcctattcctcgggtcgagtacatggaagaggaaaagaaaacctggggcaccgtgttcaagaccctgaagtccctgtacaagacccacgcctgctacgagtacaaccacatcttcccactgctcgaaaagtactgcggcttccacgaggacaatatccctcagcttgaggacgtgtcccagttcctgcagaccgataccggctttagactgaggccagttgccggactgctgagcagcagagattttctcggcggcctggccttcagagtgttccactgtacccagtacatcagacacggcagcaagcccatgtacacccctgagcctgatatctgccacgagctgctgggacatgtgcccctgttcagcgatagaagcttcgcccagttcagccaagagatcggactggcttctctgggagcccctgacgagtacattgagaagctggccaccatctactggttcaccgtggaattcggcctgtgcaagcagggcgacagcatcaaagcttatggcgctggcctgctgtctagcttcggcgagctgcagtactgtctgagcgagaagcctaagctgctgcccctggaactggaaaagaccgccatccagaactacaccgtgaccgagttccagcctctgtactacgtggccgagagcttcaacgacgccaaagaaaaagtgcggaacttcgccgccaccattcctcggcctttcagcgtcagatacgacccctacacacagcggatcgaggtgctggacaacacacagcagctgaaaattctggccgactccatcaacagcgagatcggcatcctgtgcagcgccctgcagaaaatcaagtga

SEQ ID NO: 394 - DNA, 2634 bp, Artificial Sequence
  Description of Artificial Sequence: Synthetic polynucleotide
atgagcaccgccgtgctggaaaatcctggcctgggcagaaagctgagcgacttcggccaagagacaagctacatcgaggacaactgcaaccagaacggcgccatcagcctgatcttcagcctgaaagaagaagtgggcgccctggccaaggtgctgagactgttcgaagagaacgacgtgaacctgacacacatcgagagcagacccagcagactgaagaaggacgagtacgagttcttcacccacctggacaagcggagcctgcctgctctgaccaacatcatcaagatcctgcggcacgacatcggcgccacagtgcacgaactgagccgggacaagaaaaaggacaccgtgccatggttccccagaaccatccaagagctggacagattcgccaaccagatcctgagctatggcgccgagctggacgctgatcaccctggctttaaggaccccgtgtaccgggccagaagaaagcagtttgccgatatcgcctacaactaccggcacggccagcctattcctcgggtcgagtacatggaagaggaaaagaaaacctggggcaccgtgttcaagaccctgaagtccctgtacaagacccacgcctgctacgagtacaaccacatcttcccactgctcgaaaagtactgcggcttccacgaggacaatatccctcagcttgaggacgtgtcccagttcctgcagacctgcaccggctttagactgaggccagttgccggactgctgagcagcagagattttctcggcggcctggccttcagagtgttccactgtacccagtacatcagacacggcagcaagcccatgtacacccctgagcctgatatctgccacgagctgctgggacatgtgcccctgttcagcgatagaagcttcgcccagttcagccaagagatcggactggcttctctgggagcccctgacgagtacattgagaagctggccaccatctactggttcaccgtggaattcggcctgtgcaagcagggcgacagcatcaaagcttatggcgctggcctgctgtctagcttcggcgagctgcagtactgtctgagcgagaagcctaagctgctgcccctggaactggaaaagaccgccatccagaactacaccgtgaccgagttccagcctctgtactacgtggccgagagcttcaacgacgccaaagaaaaagtgcggaacttcgccgccaccattcctcggcctttcagcgtcagatacgacccctacacacagcggatcgaggtgctggacaacacacagcagctgaaaattctggccgactccatcaacagcgagatcggcatcctgtgcagcgccctgcagaaaatcaagtgaatgaaccagaacggcgccatcagcctgatcttcagcctgaaagaagaagtgggcgccctggccaaggtgctgagactgttcgaagagaacgacgtgaacctgacacacatcgagagcagacccagcagactgaagaaggacgagtacgagttcttcacccacctggacaagcggagcctgcctgctctgaccaacatcatcaagatcctgcggcacgacatcggcgccacagtgcacgaactgagccgggacaagaaaaaggacaccgtgccatggttccccagaaccatccaagagctggacagattcgccaaccagatcctgagctatggcgccgagctggacgctgatcaccctggctttaaggaccccgtgtaccgggccagaagaaagcagtttgccgatatcgcctacaactaccggcacggccagcctattcctcgggtcgagtacatggaagaggaaaagaaaacctggggcaccgtgttcaagaccctgaagtccctgtacaagacccacgcctgctacgagtacaaccacatcttcccactgctcgaaaagtactgcggcttccacgaggacaatatccctcagcttgaggacgtgtcccagttcctgcagacctgcaccggctttagactgaggccagttgccggactgctgagcagcagagattttctcggcggcctggccttcagagtgttccactgtacccagtacatcagacacggcagcaagcccatgtacacccctgagcctgatatctgccacgagctgctgggacatgtgcccctgttcagcgatagaagcttcgcccagttcagccaagagatcggactggcttctctgggagcccctgacgagtacattgagaagctggccaccatctactggttcaccgtggaattcggcctgtgcaagcagggcgacagcatcaaagcttatggcgctggcctgctgtctagcttcggcgagctgcagtactgtctgagcgagaagcctaagctgctgcccctggaactggaaaagaccgccatccagaactacaccgtgaccgagttccagcctctgtactacgtggccgagagcttcaacgacgccaaagaaaaagtgcggaacttcgccgccaccattcctcggcctttcagcgtcagatacgacccctacacacagcggatcgaggtgctggacaacacacagcagctgaaaattctggccgactccatcaacagcgagatcggcatcctgtgcagcgccctgcagaaaatcaagtga

SEQ ID NO: 395 - DNA, 1359 bp, Artificial Sequence
  Description of Artificial Sequence: Synthetic polynucleotide
atgagcaccgccgtgctggaaaatcctggcctgggcagaaagctgagcgacttcggccaagagacaagctacatcgaggacaactgcaaccagaacggcgccatcagcctgatcttcagcctgaaagaagaagtgggcgccctggccaaggtgctgagactgttcgaagagaacgacgtgaacctgacacacatcgagagcagacccagcagactgaagaaggacgagtacgagttcttcacccacctggacaagcggagcctgcctgctctgaccaacatcatcaagatcctgcggcacgacatcggcgccacagtgcacgaactgagccgggacaagaaaaaggacaccgtgccatggttccccagaaccatccaagagctggacagattcgccaaccagatcctgagctatggcgccgagctggacgctgatcaccctggctttaaggaccccgtgtaccgggccagaagaaagcagtttgccgatatcgcctacaactaccggcacggccagcctattcctcgggtcgagtacatggaagaggaaaagaaaacctggggcaccgtgttcaagaccctgaagtccctgtacaagacccacgcctgctacgagtacaaccacatcttcccactgctcgaaaagtactgcggcttccacgaggacaatatccctcagcttgaggacgtgtcccagttcctgcagacctgcaccggctttagactgaggccagttgccggactgctgagcagcagagattttctcggcggcctggccttcagagtgttccactgtacccagtacatcagacacggcagcaagcccatgtacacccctgagcctgatatctgccacgagctgctgggacatgtgcccctgttcagcgatagaagcttcgcccagttcagccaagagatcggactggcttctctgggagcccctgacgagtacattgagaagctggccaccatctactggttcaccgtggaattcggcctgtgcaagcagggcgacagcatcaaagcttatggcgctggcctgctgtctagcttcggcgagctgcagtactgtctgagcgagaagcctaagctgctgcccctggaactggaaaagaccgccatccagaactacaccgtgaccgagttccagcctctgtactacgtggccgagagcttcaacgacgccaaagaaaaagtgcggaacttcgccgccaccattcctcggcctttcagcgtcagatacgacccctacacacagcggatcgaggtgctggacaacacacagcagctgaaaattctggccgactccatcaacagcgagatcggcatcctgtgcagcgccctgcagaaaatcaagtaa

SEQ ID NO: 396 - DNA, 1359 bp, Artificial Sequence
  Description of Artificial Sequence: Synthetic polynucleotide
atgagtacagcagtgttagagaatccaggccttggtagaaagctgtctgactttggccaggagaccagctacatcgaggacaactgcaaccagaatggagccatcagcctgatcttcagcctgaaggaggaggtgggcgccctggccaaggtgctgaggctgttcgaggagaacgacgtgaacctgacccacattgagtccagaccctccagactgaagaaggatgagtacgagttcttcacccacctggacaagagatccctgcctgccctgaccaacatcatcaagatcctgagacacgacatcggcgccaccgtgcacgagctgtccagagacaagaagaaggacaccgtgccctggttccccagaaccatccaggagctggacaggttcgccaaccagatcctgtcctacggcgccgagctggatgccgaccacccaggcttcaaggaccctgtgtacagggccagaaggaagcagtttgctgacatcgcctataactacaggcacggccagcccatccctagagtggagtacatggaggaggagaagaagacctggggcaccgtgttcaagaccctgaagtccctgtacaagacccacgcctgctatgagtacaaccacatcttccccctgctggagaagtactgcggcttccacgaggacaacatccctcagctggaggatgtgtcccagttcctgcagacctgcacaggcttcagactgagacctgtggctggcctgctgtctagcagagacttcctgggaggcctggccttcagagtgttccactgcacccagtacatcagacatggaagcaagcccatgtacacccctgagccagacatctgccatgagctgctgggccatgtgcccctgttctctgatagatcctttgcccagttcagccaggagattggcctggccagcctgggagcccctgatgagtacattgagaagctggccaccatctactggttcacagtggagtttggcctgtgcaagcagggagactccatcaaggcctatggagctggactgctgtcctcctttggagagctgcagtactgcctgtctgagaagcccaagctgctgcccctggagctggagaagacagccatccagaactacacagtgacagagttccagcccctgtactatgtggctgagagcttcaatgatgccaaggagaaggtgagaaactttgctgccaccatccccagacccttctctgtgaggtatgacccctacacccagaggattgaggtgctggacaacacccagcagctgaagatcctggctgactccatcaactctgagattggcatcctgtgctctgccctgcagaagatcaagtaa

SEQ ID NO: 397 - DNA, 1359 bp, Artificial Sequence
  Description of Artificial Sequence: Synthetic polynucleotide
atgagtacagcagtgttagagaatccaggcctaggtagaaagctgtctgactttggccaggagacctcctacattgaggacaactgcaaccagaatggagccatcagcctgatcttcagcctgaaggaggaggtgggagccctggccaaggtgctgagactgtttgaggagaatgatgtgaacctgacccacattgagtccagaccctccagactgaagaaggatgagtatgagttcttcacccacctggacaagagatccctgcctgctctgaccaacatcatcaagatcctgagacatgatattggagccacagtgcatgagctgagcagggacaagaagaaggacacagtgccttggttccccagaaccatccaggagctggacaggtttgccaaccagatcctgtcctatggagctgagctggatgctgaccaccctggatttaaggatcctgtgtacagggccagaaggaagcagtttgctgacattgcctacaactacaggcatggccagcccatccccagggtggagtacatggaggaggagaagaagacctggggcactgtgttcaagaccctgaagagcctgtacaagacccatgcctgctatgagtacaaccacatcttccccctgctggagaagtactgtggcttccatgaggacaacatccctcagctggaggatgtgtcccagttcctgcagacctgcacaggcttcagactgagacctgtggctggcctgctgtctagcagagacttcctgggcggcctggccttcagagtgttccactgcacccagtacatccggcacggaagcaagcccatgtacacccctgagcctgacatctgccacgagctgctgggccacgtgcccctgttctccgacagatccttcgcccagttcagccaggagattggcctggcctccctgggagcccctgacgagtacatcgagaagctggccaccatctactggttcaccgtggagtttggcctgtgcaagcagggagactccatcaaggcctacggcgccggcctgctgtcctccttcggcgagctgcagtactgcctgtctgagaagcccaagctgctgcccctggagctggagaagaccgccatccagaactacaccgtgaccgagttccagcccctgtactacgtggctgagtctttcaacgacgccaaggagaaggtgagaaacttcgccgccaccatccccagacccttctctgtgcgctacgacccctacacccagaggattgaggtgctggacaacacccagcagctgaagatcctggctgactccatcaactctgagattggcatcctgtgctctgccctgcagaagatcaagtaa

SEQ ID NO: 398 - DNA, 1359 bp, Artificial Sequence
  Description of Artificial Sequence: Synthetic polynucleotide
atgagtacagcagtgttagagaatccaggcctaggtagaaagctgtctgactttggccaggagacctcctacattgaggacaactgcaaccagaatggagccatcagcctgatcttcagcctgaaggaggaggtgggagccctggccaaggtgctgagactgtttgaggagaatgatgtgaacctgacccacattgagtccagaccctccagactgaagaaggatgagtatgagttcttcacccacctggacaagagatccctgcctgctctgaccaacatcatcaagatcctgagacatgatattggagccacagtgcatgagctgagcagggacaagaagaaggacacagtgccttggttccccagaaccatccaggagctggacaggtttgccaaccagatcctgtcctatggagctgagctggatgctgaccaccctggatttaaggatcctgtgtacagggccagaaggaagcagtttgctgacattgcctacaactacaggcatggccagcccatccccagggtggagtacatggaggaggagaagaagacctggggcactgtgttcaagaccctgaagagcctgtacaagacccatgcctgctatgagtacaaccacatcttccccctgctggagaagtactgtggcttccatgaggacaacatccctcagctggaggatgtgtcccagttcctgcagacctgcacaggcttcagactgagacctgtggctggcctgctgtctagcagagacttcctgggaggcctggccttcagagtgttccactgcacccagtacatcagacatggaagcaagcccatgtacacccctgagccagacatctgccatgagctgctgggccatgtgcccctgttctctgatagatcctttgcccagttcagccaggagattggcctggccagcctgggagcccctgatgagtacattgagaagctggccaccatctactggttcacagtggagtttggcctgtgcaagcagggagactccatcaaggcctatggagctggactgctgtcctcctttggagagctgcagtactgcctgtctgagaagcccaagctgctgcccctggagctggagaagacagccatccagaactacacagtgacagagttccagcccctgtactatgtggctgagagcttcaatgatgccaaggagaaggtgagaaactttgctgccaccatccccagacccttctctgtgaggtatgacccctacacccagaggattgaggtgctggacaacacccagcagctgaagatcctggctgactccatcaactctgagattggcatcctgtgctctgccctgcagaagatcaagtaa

SEQ ID NO: 399 - DNA, 1359 bp, Artificial Sequence
  Description of Artificial Sequence: Synthetic polynucleotide
atgagcaccgccgtgctggagaaccccggcctgggcagaaagctgtctgactttggccaggagaccagctacatcgaggacaactgcaaccagaatggagccatcagcctgatcttcagcctgaaggaggaggtgggcgccctggccaaggtgctgaggctgttcgaggagaacgacgtgaacctgacccacattgagtccagaccctccagactgaagaaggatgagtacgagttcttcacccacctggacaagagatccctgcctgctctgaccaacatcatcaagatcctgagacacgacatcggcgccaccgtgcacgagctgtccagagacaagaagaaggacaccgtgccctggttccccagaaccatccaggagctggacaggttcgccaaccagatcctgtcctacggcgccgagctggatgccgaccacccaggcttcaaggaccctgtgtacagggccagaaggaagcagtttgctgacatcgcctacaactacaggcacggccagcccatccctagagtggagtacatggaggaggagaagaagacctggggcaccgtgttcaagaccctgaagtccctgtacaagacccacgcctgctatgagtacaaccacatcttccccctgctggagaagtactgcggcttccacgaggacaacatcccccagctggaggacgtgtcccagttcctgcagacctgcaccggcttcagactgaggccagtggccggcctgctgtctagcagagacttcctgggcggcctggccttcagagtgttccactgcacccagtacatccggcacggaagcaagcccatgtacacccctgagcctgacatctgccacgagctgctgggccacgtgcccctgttctccgacagatccttcgcccagttcagccaggagattggcctggcctccctgggagcccctgacgagtacatcgagaagctggccaccatctactggttcaccgtggagtttggcctgtgcaagcagggagactccatcaaggcctacggcgccggcctgctgtcctccttcggcgagctgcagtactgcctgtctgagaagcccaagctgctgcccctggagctggagaagaccgccatccagaactacaccgtgaccgagttccagcccctgtactacgtggctgagtctttcaacgacgccaaggagaaggtgagaaacttcgccgccaccatccccagacccttctctgtgcgctacgacccctacacccagaggatcgaggtgctggacaacacccagcagctgaagatcctggccgactccatcaactctgagatcggcatcctgtgctctgccctgcagaagatcaagtaa

SEQ ID NO: 400 - DNA, 1359 bp, Artificial Sequence
  Description of Artificial Sequence: Synthetic polynucleotide
atgagtacagcagtgttagagaacccaggccttggcagaaaactgtctgactttggccaggagacctcctacattgaggacaactgcaaccagaatggagccatttctctcatcttctccctgaaagaagaagtgggggctctggccaaggtgctgagactgtttgaggagaatgatgtgaacctgacacatatagagagcagaccttccagactcaaaaaagatgagtatgagttcttcacccacctggataagaggagcctgcctgccctcaccaacatcatcaaaatcctcagacatgacattggtgccacagtccatgagctgagtagagacaagaagaaggacacagtcccctggttccccagaactattcaggaactggacaggtttgccaatcagatcctgtcctatggagctgagcttgatgctgaccacccaggtttcaaggatcctgtgtacagagccaggaggaagcagtttgcagatattgcctacaactacaggcatggacagcccatccccagggtggagtacatggaggaagagaagaaaacctggggcactgtgttcaaaaccctgaagagcctgtacaagacccatgcctgctatgaatacaatcacatctttcctctgctggagaagtactgtggcttccatgaagacaatattccccagctggaagatgtctcccagttccttcagacctgcacaggattcaggctgaggccagtggctggcctcctgagctccagggacttcctgggaggcctggccttcagagtcttccactgcactcagtatatcaggcatggctccaagcccatgtacaccccagagcctgacatctgccatgagctgctgggccatgtgcccctcttcagtgacagatcctttgcccagttcagccaagaaattggattggcctctctgggggcccctgatgaatatattgaaaagctggctaccatctactggtttacagtggaatttgggctgtgcaaacagggagacagcatcaaggcctatggtgctggactgctcagcagctttggagagctccagtactgcctgtcagagaaacccaagctcctgcccctggagttggaaaaaacagccatccagaactatactgtcacagaattccagcctctctactatgtggcagagtccttcaatgatgccaaagagaaagtgaggaactttgctgccaccattccaagacccttctctgtgagatatgacccctacacacagagaattgaggtgttggataacacccagcagctcaagattctggcagactccatcaactctgagattggcatcctgtgttctgccctgcagaagatcaagtaa

SEQ ID NO: 401 - DNA, 1359 bp, Artificial Sequence
  Description of Artificial Sequence: Synthetic polynucleotide
atgagtacagcagtgttagagaacccaggccttggaagaaaactgtctgactttggccaggagacctcctacatcgaggacaactgcaaccagaatggagccatttctctcatcttctccctgaaagaagaagtgggggctctggccaaggtgctgcggctgtttgaggagaatgatgtgaacctgacacatatagagagccgcccttccagactcaaaaaagatgagtatgagttcttcacccacctggataagaggagcctgcctgccctcaccaacatcatcaaaatcctcagacatgacattggtgccacagtccacgagctgagtagagacaagaagaaggacaccgtcccctggttccccagaactattcaggaactggacaggtttgccaatcagatcctgtcctatggagctgagcttgatgctgaccacccaggtttcaaggatcctgtgtacagagccaggaggaagcagtttgcagatattgcctacaactaccgccatggacagcccatccccagggtggagtacatggaggaagagaagaaaacctggggcactgtgttcaaaaccctgaagagcctgtacaagacccatgcctgctatgaatacaatcacatctttcctctgctggagaagtactgtggcttccatgaagacaatattccccagctggaagatgtctcccagttccttcagacctgcacaggattcaggctgaggccagtggctggcctcctgagctccagggacttcctgggaggcctggccttcagagtcttccactgcactcagtatatcaggcatggctccaagcccatgtacaccccagagcctgacatctgccatgagctgctgggccatgtgcccctcttcagtgacagatcctttgcccagttcagccaagaaattggattggcctctctgggggcccctgatgaatatattgaaaagctggctaccatctactggtttacagtggaatttgggctgtgcaaacagggagacagcatcaaggcctatggtgctggactgctcagcagctttggagagctccagtactgcctgtcagagaaacccaagctcctgcccctggagttggaaaaaacagccatccagaactatactgtcacagaattccagcctctctactacgtggccgagtccttcaacgatgccaaagagaaagtgaggaactttgctgccaccattccaagacccttctctgtgagatatgacccctacacacagagaattgaggtgttggataacacccagcagctcaagattctggcagactccatcaactctgagattggcatcctgtgttctgccctgcagaagatcaagtaa

SEQ ID NO: 402 - DNA, 1359 bp, Artificial Sequence
  Description of Artificial Sequence: Synthetic polynucleotide
atgtccaccgctgtgctggagaaccctggcctgggcagaaagctgtctgactttggccaggagacctcctacattgaggacaactgcaaccagaatggagccatctccctgatcttctccctgaaggaggaggtgggagccctggccaaggtgctgagactgtttgaggagaatgatgtgaacctgacccacattgagtccagaccctccagactgaagaaggatgagtatgagttcttcacccacctggacaagagatccctgcctgccctgaccaacatcatcaagatcctgagacatgacattggagccaccgtgcatgagctgtccagagacaagaagaaggacaccgtgccctggttccccagaaccatccaggagctggacagatttgccaaccagatcctgtcctatggagctgagctggatgctgaccaccctggcttcaaggaccctgtgtacagagccagaagaaagcagtttgctgacattgcctacaactacagacatggccagcccatccccagagtggagtacatggaggaggagaagaagacctggggcaccgtgttcaagaccctgaagtccctgtacaagacccatgcctgctatgagtacaaccacatcttccccctgctggagaagtactgtggcttccatgaggacaacatcccccagctggaggatgtgtcccagttcctgcagacctgcaccggcttcagactgagacctgtggctggcctgctgtcctccagagacttcctgggaggcctggccttcagagtgttccactgcacccagtacatcagacatggctccaagcccatgtacacccctgagcctgacatctgccatgagctgctgggccatgtgcccctgttctctgacagatcctttgcccagttctcccaggagattggcctggcctccctgggagcccctgatgagtacattgagaagctggccaccatctactggttcaccgtggagtttggcctgtgcaagcagggagactccatcaaggcctatggagctggcctgctgtcctcctttggagagctgcagtactgcctgtctgagaagcccaagctgctgcccctggagctggagaagaccgccatccagaactacaccgtgaccgagttccagcccctgtactatgtggctgagtccttcaatgatgccaaggagaaggtcagaaactttgctgccaccatccccagacccttctctgtgagatatgacccctacacccagagaattgaggtgctggacaacacccagcagctgaagatcctggctgactccatcaactctgagattggcatcctgtgctctgccctgcagaagatcaagtaa

SEQ ID NO: 403 - DNA, 1359 bp, Artificial Sequence
  Description of Artificial Sequence: Synthetic polynucleotide
atgtccacagctgtgctggagaaccctggcctgggcagaaagctgtctgactttggccaggagacctcctacattgaggacaactgcaaccagaatggagccatctccctgatcttctccctgaaggaggaggtgggagccctggccaaggtgctgagactgtttgaggagaatgatgtgaacctgacccacattgagtccagaccctccagactgaagaaggatgagtatgagttcttcacccacctggacaagagatccctgcctgccctgaccaacatcatcaagatcctgagacatgacattggagccacagtgcatgagctgtccagagacaagaagaaggacacagtgccctggttccccagaaccatccaggagctggacagatttgccaaccagatcctgtcctatggagctgagctggatgctgaccaccctggcttcaaggaccctgtgtacagggccagaagaaagcagtttgctgacattgcctacaactacagacatggccagcccatccccagagtggagtacatggaggaggagaagaagacctggggcacagtgttcaagaccctgaagtccctgtacaagacccatgcctgctatgagtacaaccacatcttccccctgctggagaagtactgtggcttccatgaggacaacatcccccagctggaggatgtgtcccagttcctgcagacctgcacaggcttcagactgagacctgtggctggcctgctgtcctccagagacttcctgggaggcctggccttcagagtgttccactgcacccagtacatcagacatggctccaagcccatgtacacccctgagcctgacatctgccatgagctgctgggccatgtgcccctgttctctgacagatcctttgcccagttctcccaggagattggcctggcctccctgggagcccctgatgagtacattgagaagctggccaccatctactggttcacagtggagtttggcctgtgcaagcagggagactccatcaaggcctatggagctggcctgctgtcctcctttggagagctgcagtactgcctgtctgagaagcccaagctgctgcccctggagctggagaagacagccatccagaactacacagtgacagagttccagcccctgtactatgtggctgagtccttcaatgatgccaaggagaaggtcagaaactttgctgccaccatccccagacccttctctgtgagatatgacccctacacccagagaattgaggtgctggacaacacccagcagctgaagatcctggctgactccatcaactctgagattggcatcctgtgctctgccctgcagaagatcaagtaa

SEQ ID NO: 404 - DNA, 1359 bp, Artificial Sequence
  Description of Artificial Sequence: Synthetic polynucleotide
atgagcaccgccgtgctggagaacccggggctcggccggaagttgtccgacttcgggcaggagacctcctacatcgaggataactgcaaccaaaacggggcgatcagtctcatcttcagcttgaaagaggaggtcggcgccctggcgaaagtgctgaggctcttcgaggagaacgacgtgaacctcacccatatcgagtccaggccgtctcggctgaaaaaggacgagtacgagttcttcacccacttagacaagaggtcgctgcccgcgctgacgaacatcatcaagatccttcgccacgacatcggggccaccgtgcacgagctgagcagggacaagaagaaggatacagtcccgtggttcccccgcaccattcaggagctcgatcgtttcgccaaccagatcctcagctacggtgcggaactcgacgcggatcacccaggcttcaaggaccccgtgtaccgcgcgcgccggaaacagttcgccgatatcgcgtacaactaccgccatggccagccgatcccccgggtcgaatacatggaggaggaaaagaagacgtgggggacggtgttcaaaacgctgaagtcattgtataagacccacgcgtgctacgagtataaccacatcttccccctgctggaaaagtactgcggatttcacgaggacaacatcccccagctggaggacgtgagccagttcctccagacctgcacggggttccgcctgcggccggtggccgggctgctttcctctcgcgacttcctgggcgggttggccttccgggtgttccactgcacccagtacatccgccacggctccaagccgatgtacactcccgagccggacatctgccacgagttgctggggcacgtgcctttgttcagcgaccgcagcttcgcccagttcagccaggagatcggcctcgcctcactgggcgcccccgatgagtacatagagaaattggcgacgatctactggtttactgtcgagttcgggctctgcaagcagggcgactcgatcaaggcgtacggcgcgggcttgctgagctctttcggcgagctgcagtattgcctgagcgagaagcccaagctgttgccccttgagctagagaagacagcaatccagaactacacggtcaccgagttccagcccttgtactacgtggccgagtccttcaatgacgccaaggagaaggtgaggaatttcgcagccaccatccccaggcccttctcggtgcgctacgacccctatacccagcgcattgaggtcctggataacacccagcagctgaagatcttggccgacagcatcaactccgagattggcatcttgtgctccgcactgcagaagatcaagtaa

SEQ ID NO: 405 - DNA, 1359 bp, Artificial Sequence
  Description of Artificial Sequence: Synthetic polynucleotide
atgagcacagctgtactcgaaaaccctggtcttggtagaaaattgagtgattttggtcaggagacctcttacattgaggataactgtaatcaaaatggagccatttctcttattttctcccttaaagaggaggtaggagctttagcaaaagtactgagattgtttgaggagaatgatgtcaatcttacccatattgaatctaggccaagccgccttaaaaaagatgaatatgaatttttcactcatcttgacaaaaggagtcttcctgcacttactaatatcataaaaatactgaggcacgatattggtgccactgttcatgaactaagtcgggataaaaagaaggatactgttccctggttccccagaacaattcaagaacttgacagatttgcaaatcaaattctcagctatggtgctgaattggacgctgaccatcctggatttaaggaccctgtttatagggctaggagaaagcagtttgctgacatagcttacaactatcgccatggtcaaccaataccaagggtggaatatatggaggaagagaagaaaacatggggtactgtatttaaaactttaaagtctctttataagacccatgcttgttacgagtataatcatatattcccactccttgaaaaatattgtggctttcatgaggacaatatcccccaactggaagatgtatcccaatttcttcagacttgtactgggttcaggctaagacctgtagcaggacttctaagtagtagagattttcttggggggctagcttttagagtgtttcattgcactcagtacatcagacatggttccaagcctatgtacactcctgaacctgatatttgccatgaattgcttggtcatgttcctctattctctgatagatcatttgctcaattttcacaagagattggtctggcaagtctgggagcacctgatgagtatattgagaagctggctactatctattggtttacagtagagtttggactgtgcaagcagggtgattcaatcaaggcctatggcgcaggtttactctcttcatttggagagttgcagtattgcctgtcagagaagcccaagctgttacccttagagttggagaagactgcaatccagaactatacagtaacagagtttcagcccctctactatgttgcagaatcatttaatgatgctaaagagaaagttaggaattttgctgctacaattcctagacccttttcagttagatatgatccctatacacagaggattgaggttctggataacacacagcagctgaaaattttggctgattctataaacagtgagataggtatactatgctctgctctacagaagatcaagtaa

SEQ ID NO: 406 - DNA, 1359 bp, Artificial Sequence
  Description of Artificial Sequence: Synthetic polynucleotide
atgagtacagcagttttagagaacccaggattaggcaggaagctgtcagattttggccaggaaaccagctatatagaagacaactgcaaccagaatggagccatttctctcatcttttccctcaaggaagaagtgggggccctggctaaagtactcagactttttgaagagaatgatgtcaacctgacccatattgagagtagacccagcaggctcaagaaggatgagtatgagttctttactcacttggacaaaaggtcacttccagctctcaccaacataatcaaaatcctcagacatgacattggagccactgtccatgagctcagcagggacaagaagaaggatactgtgccctggttcccaaggactattcaggagttagatagatttgccaaccagatcctgtcctatggggctgaactggatgcagaccaccctggatttaaagaccctgtgtacagagctagaagaaagcagtttgctgatattgcctacaactacaggcatgggcagcccattcctagagtggaatacatggaggaagagaaaaagacctggggaacagtcttcaaaaccctcaagtctctgtacaagacccatgcctgctatgaatataatcacatcttccccttgctggaaaagtactgtggcttccatgaggacaacattccccaactagaagatgtgtcccagttcctgcagacctgcactgggttcagattaagacctgtggcaggacttctgtcttccagagacttcctgggtgggcttgcattcagggtgttccactgcacccagtacatcagacatgggagcaagcccatgtacacacctgagcctgatatttgccatgaactcttaggacatgttccactcttttctgacaggagttttgcccagtttagccaggagataggcctagcatccctgggagcaccagatgaatacattgaaaaactggccaccatctactggttcacagtggagtttgggctatgcaaacagggagattccatcaaggcctatggagctggcctgttatcttcctttggagaactccagtattgcctgagtgagaagcccaagcttctcccactggagctggagaagactgccatccagaactatactgtcactgaattccagcccctttactatgtggctgagagcttcaatgatgctaaggagaaggtgaggaattttgctgcaaccatccccaggcccttctctgtcaggtatgacccctacacccagagaatagaggtgctggacaacacccagcagctgaagatcttggctgacagcatcaactctgagattggcatcctctgctctgccttgcagaagattaagtaa

SEQ ID NO: 407 - DNA, 1359 bp, Artificial Sequence
  Description of Artificial Sequence: Synthetic polynucleotide
atgagtacagcagttttagagaacccaggattaggcaggaagctgagcgatttcggccaggagaccagctatatcgaggacaactgcaaccagaacggggccatctcgctgatcttctccctcaaggaagaggtcggggccctcgccaaggtcttgcgcctgttcgaggagaacgacgtgaaccttacgcacattgagagccgccccagcaggttgaagaaggatgagtacgagttcttcacccacctggacaagcgcagcctgcccgcgctgaccaacatcatcaagatcttgcgccacgacatcggggcgacggtgcacgagctctcccgggataaaaagaaggacaccgtgccctggttcccccgcaccatccaggaattggacaggttcgccaaccagatcctctcctacggggcggagctggacgcggaccaccccggctttaaggaccccgtctaccgcgcccgccgcaagcagttcgccgacatcgcctacaattacaggcacgggcaacccatcccgcgggtggagtacatggaggaggagaagaagacctggggcaccgtcttcaagaccctgaagagcctctacaagacacacgcgtgctacgagtacaaccacatcttccctttgctagagaagtactgcgggttccacgaagacaatattccccagttggaggacgtgtcccagtttctgcagacctgcacgggcttcaggttgaggcccgtcgccggcttgttgagcagcagggacttcctgggaggcctcgccttcagggtgttccattgcacccagtatatcagacacggctcgaagcccatgtacacccccgagcccgacatctgccatgagctgctggggcacgtgcccttgttctccgacaggtcgttcgcccagttcagccaggagatcgggctggcctccttgggcgccccggatgagtacatcgaaaagctggccaccatctactggttcacagtggagtttgggttgtgcaagcagggggacagcatcaaggcttacggggcgggcctgctctcctccttcggggagctccagtactgcctctcggagaagcccaagttgctccccctggagttggagaagacagccatccaaaactacactgtgacggagttccagcccttgtactacgtcgccgagtccttcaacgatgccaaggagaaggtgaggaactttgccgccacgatccccaggcccttctctgtcaggtacgacccctacacccagcgcatcgaggtgctggacaacacgcagcagctgaagatcctggcggactccatcaactccgagattggcatcttgtgctccgccctgcagaagatcaaataa

SEQ ID NO: 408 - DNA, 1359 bp, Artificial Sequence
  Description of Artificial Sequence: Synthetic polynucleotide
atgtccactgcagtcctggagaatccaggactggggaggaaactgtctgactttgggcaagagacctcctatattgaggacaactgtaaccaaaatggagccatctccctgatcttttccctgaaagaagaggtgggggccttagctaaggtgcttaggctttttgaggagaatgatgtgaatctgactcacattgagtctaggcccagtagactgaagaaggatgagtatgaattctttacccatctggataaaagatccctccctgctctgactaacatcatcaagatcttgaggcatgatataggtgccactgtgcatgagctgtccagagacaagaagaaggacactgtgccatggtttccaaggacaatccaggagctggacaggtttgccaatcagatcctgagctatggggctgagctggatgctgaccaccctggcttcaaggacccagtgtacagggccaggagaaagcagtttgctgacatagcctacaactatagacatgggcagcccattcctagggtggagtacatggaggaagagaagaagacctgggggactgtgttcaagaccctcaagtccctgtacaagacccatgcctgctatgagtacaatcacatcttccccttgctggagaagtactgtgggttccatgaggacaacatcccccagctggaagatgtctcacagttcctgcagacctgcacaggtttcaggttgagaccagttgctggcctgctgtcaagcagagacttcttggggggactggcctttagagtgttccattgtacccagtacatcagacatggctccaagcccatgtacaccccagagccagacatctgccatgagctcctggggcatgtgcccctgttttctgatagatcctttgcccagttcagccaggagattggcttggccagcttgggagcccctgatgagtacattgagaaactggccaccatttattggttcacagtggaatttggactctgcaagcaaggggacagcatcaaggcctatggagctggcttgctgtccagctttggagagctgcagtactgcctgtctgagaagcccaagctcctgcccctggagctggaaaagactgccatccagaattatacagtgactgagttccagcccctgtactatgtggcagagtccttcaatgatgccaaggagaaagtgaggaactttgcagccaccatccccagacccttctctgtcagatatgacccctacacccagagaattgaggtgctggataacacccagcagctgaagattctggctgacagcatcaactcagagattggcatcctgtgctctgccctgcagaagatcaagtaa

SEQ ID NO: 409 - DNA, 1359 bp, Artificial Sequence
  Description of Artificial Sequence: Synthetic polynucleotide
atgtctacagcagtcctggaaaacccaggattgggtaggaagctgtcagactttgggcaagagacttcctacattgaagacaactgcaaccaaaatggagcaatcagcttaatcttcagtttgaaagaggaggtgggtgccctggctaaagtcctgagactatttgaagagaatgatgtaaacctgacacatattgagagtagaccatctagactcaaaaaggatgagtatgagttcttcacacacttggataagagaagcttaccagctctgacaaacatcatcaaaatactgaggcatgatataggtgccacagtacatgaacttagcagggacaaaaagaaagatactgtaccctggtttcctagaactatacaggagttagatagatttgcaaatcagattttgagctatggggctgagttggatgctgatcaccctggatttaaagatcctgtctatagggcaagaagaaaacaatttgcagatatagcatataactacagacatggacaacctataccaagggtggaatatatggaagaggaaaagaaaacatggggtacagttttcaaaacacttaaatctctatacaaaactcatgcttgttatgaatataaccacattttccctctactggaaaaatactgtggttttcatgaggacaacataccacagctagaagatgtcagccagtttctccaaacatgtacaggttttaggttaagaccagttgctgggctgctcagtagtagggacttcctggggggtcttgctttcagagtattccactgcactcaatatataagacatggcagtaagccaatgtatactcctgagccagatatatgtcatgagttgttaggacatgtacctttattttcagacaggtcttttgcacagttttctcaagaaattggactagccagtctaggggctcctgatgaatatattgaaaagttagctactatttactggtttacagtagagtttggtctttgtaagcagggggatagcatcaaagcatatggggcaggacttttatcttcctttggggaactccaatactgtttaagtgaaaagcctaaactcctacccttagaactagagaaaactgctatacagaactacactgttactgaatttcagcctctatattatgttgctgaatcttttaatgatgccaaagaaaaagtaaggaactttgctgctaccatacctaggccattttcagttaggtatgacccatacacacagaggattgaggtcttagataacacacaacaactgaagatattggctgacagcataaactcagagataggtatactttgtagtgctctacagaagataaagtaa

SEQ ID NO: 410 - DNA, 1359 bp, Artificial Sequence
  Description of Artificial Sequence: Synthetic polynucleotide
atgtctacagcagtcttggaaaacccaggattgggtaggaagctgtcagactttgggcaagagactagctacattgaagacaactgcaaccaaaatggagccatcagcttaatcttcagtttaaaagaggaggttggtgccctggctaaggtcctgagactgtttgaagagaatgatgtgaacctgacacacattgagagcagaccatccagactgaagaaggatgagtatgagttcttcacacacctggataagagaagcctgccagcactgacaaacatcatcaagattctgagacatgacattggtgctactgtgcatgagctgtcaagggataagaagaaggacacagtgccctggttccccagaaccattcaggaactggatagatttgccaaccagatcctgtcctatggggctgagctggatgcagatcaccctggattcaaggatccagtgtacagagcaaggagaaagcagtttgctgacattgcatataactacagacatggccagccaattcctagagtggagtacatggaggaagagaagaagacctggggaacagttttcaagacactcaaatccctctacaagacccatgcttgctatgagtacaatcatatcttcccactgctggagaagtactgtggcttccatgaggacaatatcccccagctggaagatgtgtctcagttcctgcagacctgcacaggcttcaggctgagacctgttgctggactgctgtccagtagggactttctgggaggactggctttcagagtgttccattgcacccagtatatcagacatggaagcaagcccatgtacacacctgagccagacatctgccatgagctactgggccatgtgccacttttttcagacagatcctttgcccagtttagccaggaaattggactggcatctctgggggccccagatgagtacattgagaagctggctaccatctactggttcacagtggagtttggactgtgcaagcagggggattctatcaaggcctatggagcaggactcctgtcctcttttggagagctgcagtactgcctgagtgagaagccaaagctgctgccactggagctggaaaagactgctatccagaactacactgtgactgagttccagccactgtactatgtggctgagtcattcaatgatgccaaggagaaagtcaggaactttgctgccactatccccaggcccttcagtgtgagatatgacccttacacacagaggattgaggtcctggacaatacacagcagctgaaaatcctggctgatagcatcaactctgagattggcatcctgtgcagtgccctgcagaagatcaagtaa

SEQ ID NO: 411 - DNA, 1359 bp, Artificial Sequence
  Description of Artificial Sequence: Synthetic polynucleotide
atgtcaacagcagttttagaaaacccagggctaggaagaaagttgtcagactttggccaggagacctcatacattgaggacaattgtaaccagaatggggccatctccctgatcttttctctgaaggaggaggtgggtgccctggctaaagtcctgagactgtttgaagagaatgatgtgaacctgacccacattgagagcagaccatccagactgaagaaggatgagtatgagttcttcacacacctggataagagaagcctgccagcactgacaaacatcatcaagattctgagacatgacattggtgctacagtgcatgagctgtcaagggataagaagaaggacacagtgccctggttccccagaaccattcaggaactggacagatttgccaaccagatcctgtcctatggggctgagctggatgcagatcacccaggattcaaggatccagtgtacagagcaaggagaaagcagtttgctgacattgcatacaactacagacatggccagccaattcctagagtggagtacatggaggaggagaagaagacctggggaacagttttcaagacactcaaatccctctacaagacccatgcttgctatgagtacaatcatatcttcccactgctggagaagtactgtggcttccatgaggacaatatcccccagctggaagatgtgtctcagttcctgcagacctgcacaggcttcaggctgagacctgttgctggactgctgtccagcagggactttctgggaggactggctttcagagtgttccactgcacccagtatatcagacatggaagcaagcccatgtacacacctgagccagacatctgccatgagctgctgggccatgtgccactgttttcagacagatcctttgcccagtttagccaggagattggactggcatctctgggagccccagatgagtacattgagaagctggctaccatctactggttcacagtggagtttggactgtgcaagcagggggattctatcaaggcctatggagcaggactgctgtcctcttttggagagctgcagtactgcctgagtgagaagccaaagctgctgccactggagctggaaaagactgctatccagaactacactgtgactgagttccagccactgtactatgtggctgagtcattcaatgatgccaaggagaaagtcaggaactttgctgccactatccccagacccttctcagtgagatatgacccttacacacagaggattgaggtcctggacaatacacagcagctgaaaatcctggctgacagcatcaactcagagattggcatcctgtgcagtgccctgcagaagatcaagtaa

SEQ ID NO: 412 - DNA, 1359 bp, Artificial Sequence
  Description of Artificial Sequence: Synthetic polynucleotide
atgtctactgctgtcttggaaaatccaggactgggcaggaaactttcagattttggacaagaaacaagctacattgaagataattgtaaccaaaatggagctatttccttaatcttcagtctcaaagaggaagtaggtgcccttgctaaggtactaagactatttgaagagaatgatgtaaacctcactcatatagagtcaaggcctagtaggctcaagaaagatgaatatgagttctttacccatttggataagagatcccttccagccctcactaatatcataaaaatcctgaggcatgatataggggccactgtacatgaactaagtagggataagaaaaaagatactgtgccatggtttccaaggactatacaagaactagacaggtttgcaaaccaaattttgtcctatggtgcagagctagatgctgaccatccaggctttaaggatccagtttatagagccagaaggaaacagtttgctgacatagcttataactataggcatggtcaacccataccaagggttgaatacatggaggaggaaaagaagacctggggaactgtatttaaaaccctgaaatctctgtacaagactcatgcttgttatgagtataaccatatcttccccttgttagaaaagtattgtggatttcatgaagataatattccccagcttgaggatgtatcacagttcttacaaacctgtactggctttaggctaagacctgtagcaggtttactgtcctcaagagattttctgggggggctagcatttagggtttttcattgtacacaatacataaggcatgggagtaagcccatgtatacacctgagccagatatatgccatgaactgttaggccatgtacctttattctcagatagaagctttgcacaattcagtcaagaaatagggttggcatcactaggagccccagatgaatacattgaaaagctagcaaccatatattggtttacagtagaatttggattgtgcaagcaaggagactcaatcaaagcttatggggctggactgctatcttcctttggagaattacagtattgtttgtctgagaaacccaaactcttgccattggagttagagaagactgccatacagaactatactgttactgagttccaacctctatactatgttgcagaatctttcaatgatgctaaagagaaagttagaaactttgctgctactatacctaggccattcagtgtcaggtatgatccatatacacaaagaatagaggttttggataacactcaacaactgaagatactagctgattctataaacagtgagattgggatactatgcagtgcccttcaaaagataaaatag

SEQ ID NO: 413 - DNA, 1359 bp, Artificial Sequence
  Description of Artificial Sequence: Synthetic polynucleotide
atgtccacagcagttttagagaatccaggtttaggtagaaagctctcagactttggtcaagagacaagctacattgaggataactgcaaccagaatggagccatctcccttatcttcagcttgaaggaggaagtaggtgcacttgctaaggtactgagactatttgaagagaatgatgttaacctaactcatatagagtcaaggcctagtaggctcaagaaagatgaatatgagttctttacccatttggataagaggtccttacctgccttaactaatatcataaaaattctgaggcatgacataggggccactgtgcatgaattgagtagggataagaaaaaagatactgtgccatggtttccaaggactattcaagaactagataggtttgcaaaccaaattttgtcctatggtgcagagctagatgctgatcatccaggctttaaggatccagtttatagagccagaaggaaacaatttgctgacatagcttataactataggcatggtcaacccataccaagggttgaatatatggaagaagaaaagaaaacctggggaactgtctttaagaccttaaaaagcctatacaaaactcatgcttgttatgagtataatcatatcttcccactgttagaaaagtattgtggatttcatgaagataatattccccagcttgaggatgtatcacagttcctgcaaacctgtacaggctttaggctaagacctgtagcaggtttattgtcctcaagagattttctgggggggctagcatttagggtttttcattgtacacaatacataaggcatgggtctaagcccatgtatacacctgagccagatatatgccatgaactgttaggccatgtacctttattctcagatagaagctttgcacaattcagtcaagaaatagggttggcatcactaggagccccagatgaatacattgaaaagctagcaactatatattggtttacagtagaatttggattgtgcaagcaaggagactcaatcaaagcttatggggctggactgctatcttcctttggagaattacagtattgtttgtctgagaaacccaaactcttgccattggagttagagaaaactgccatacagaactatactgttactgagttccaacctctatactatgttgcagaatcttttaatgatgctaaagagaaagttagaaactttgctgctactatacctaggccattcagtgtcaggtatgatccatatacacaaagaatagaggttttggataacactcaacaactgaagatactagctgattctataaacagtgagatagggatactatgttcagcccttcaaaagataaaatag

SEQ ID NO: 414 - DNA, 1359 bp, Artificial Sequence
  Description of Artificial Sequence: Synthetic polynucleotide
atgtccacagcagttttagagaatccaggtttaggtagaaagctctcagactttggtcaagagacaagctacattgaagacaactgcaaccagaatggagccatctcccttatcttcagcttgaaagaagaggtgggtgctttggccaaggtgctgagactgtttgaagaaaatgatgtcaacctcactcacattgagtcaaggccttcaagattgaagaaagatgagtatgaattcttcacacatttggataagaggtccctgccagccctgaccaacatcatcaaaattctgaggcatgatattggggccacagtccatgaactcagcagggacaagaaaaaagatactgtgccctggtttccaagaaccatccaggagctggacaggtttgccaatcagatcttatcctatggggctgagttggatgcagaccacccaggcttcaaggatcctgtgtacagagctagaaggaaacaatttgcagacattgcttacaactataggcatggtcagcccatccccagggtggaatacatggaggaggaaaagaagacctggggaactgtatttaaaaccctgaaatctctgtataaaactcatgcctgctatgagtacaatcacatctttccactcttggagaaatactgtgggttccatgaggacaatattccccagctggaggatgtgtctcagttcctgcagacctgcactggttttaggctgagacctgtagcaggtttgctatcctcaagagacttcctggggggcctagcatttagggttttccactgcacccagtacatcagacatgggtcaaaacccatgtacacccctgagccagacatctgccatgagctcctgggccatgtgcctctcttctcagacagatcttttgcacagtttagccaggaaataggcttggcctccttgggtgcaccagatgaatatatagaaaaactagctacaatctattggttcactgttgaatttggcttgtgcaagcagggagactcaatcaaggcttatggagctggtttgcttagctcctttggggagctgcaatactgcctttctgagaagcccaagttgctgccactggaattggagaagacagccattcagaactacacagtgacagagttccagcctctgtattatgtagcagaaagcttcaatgatgccaaagagaaggttagaaattttgctgctactattcctagaccattcagtgtcaggtatgacccctatactcagaggatagaggtgttggacaacactcagcagctcaagattctggctgacagtatcaactcagaaattggaatcctgtgttctgcccttcagaagataaaatag

SEQ ID NO: 415 - DNA, 1359 bp, Artificial Sequence
  Description of Artificial Sequence: Synthetic polynucleotide
atgagcacagcagtcttagaaaatccaggcctgggaaggaagttgtctgactttggccaggagacctcctacattgaggacaactgcaaccagaatggggccatctccttgatcttcagcctgaaggaagaagttggagcattagctaaggttctaagactatttgaggaaaatgatgtgaatttgactcatatagaatctaggcccagtaggctgaaaaaagatgaatatgaattttttactcacttagacaaaagatctctgccagctttaactaatattatcaagatccttagacatgacattggagctacagtacatgagctttcaagggataaaaagaaggatacagtcccatggtttccaagaacaatacaggagctagacagatttgcaaatcaaatcctttcatatggggctgagcttgatgctgaccacccaggcttcaaagaccctgtttacagggccagaaggaaacaatttgcagatatagcatacaactacaggcatggtcaacccatccctagggtggagtacatggaggaggaaaagaagacctggggcacagtgttcaagacactgaagtccctgtacaagacacatgcttgctatgaatataatcacatcttccctctcctggagaaatactgtggctttcatgaggacaacataccacaattggaagatgtaagtcaattcttgcagacatgcactggcttcaggctgaggcctgtggctggtctactgagctccagagacttcctgggaggcttggcattcagggtcttccactgcacccagtatataaggcatggctccaagcctatgtacaccccagagcctgacatctgccatgagttattgggtcatgttcctctcttctctgatagaagctttgcccagttctcccaagagataggtttagcatcactaggggctccagatgagtacattgagaagctagctaccatatattggtttacagttgaatttggtctatgcaagcaaggtgacagcataaaggcttatggagctggcctcttgagctcctttggagaattacaatattgtttgtctgaaaaacccaaactacttcctttagaacttgagaaaacagctatacaaaactatactgtaacagagttccaacctttatattatgttgctgaaagtttcaatgatgctaaagagaaggtgaggaattttgcagctacaatacctagaccatttagtgtaaggtatgatccttatacccaaagaattgaagttttggataatacacaacaactaaagatcttagctgattcaatcaatagtgaaattggtatcctatgcagtgctttacaaaagataaaataa

SEQ ID NO: 416 - DNA, 1359 bp, Artificial Sequence
  Description of Artificial Sequence: Synthetic polynucleotide
atgagcacagctgtcttggaaaacccaggcctgggcaggaagttgtctgactttggccaggagacctcctacattgaggacaactgcaaccagaatggggccatctccttgatcttcagcctgaaggaggaggtgggagccctggccaaggtcctgaggctgtttgaggagaatgatgtgaacctgacccacattgagtccaggcccagtaggctgaagaaggatgagtatgagttcttcacccacctggacaagagatccctgccagctctgaccaacatcattaagatcctgagacatgacattggggccacagtgcatgagctgagcagggacaagaagaaggacacagtgccctggttccccagaaccatccaggagctggacaggtttgccaaccagatcctgtcctatggagctgagctggatgcagaccaccctggcttcaaggacccagtgtacagggccagaaggaagcagtttgctgacattgcctacaactacaggcatggccagcccatcccaagggtggagtacatggaggaggagaagaagacctggggcacagtgttcaagacactgaagtccctgtacaagacccatgcttgctatgagtataaccacatcttccctctcctggagaaatactgtggcttccatgaggacaacatccctcagctggaggatgtgagtcagttcctgcagacctgcactggcttcaggctgaggcctgtggcaggactcctgagcagcagggacttcctgggaggcttggccttcagggtgttccactgcacccagtatatcaggcatggctccaagcctatgtacaccccagagcctgacatctgccatgagctgctggggcatgtgcccctgttctctgacaggagctttgcccagttcagccaggagattggcctggcctccctgggggctcctgatgagtacattgagaagctggctaccatctactggtttacagtggagtttgggctgtgcaagcagggggacagcatcaaggcctatggggctgggctgctgtcctcctttggagagctgcagtactgcctgtctgagaagcccaagctcctccccctggagctggagaagactgccatccagaactacactgtgacagagttccagcccctgtactatgtggcagagtccttcaatgatgccaaggagaaggtgaggaactttgctgccaccatccccaggcccttctcagtgagatatgacccctacacccagaggattgaggtgctggacaacacccagcagctgaagatcctggcagacagcatcaactctgagattggaatcctgtgctctgccctgcagaagatcaagtaa

SEQ ID NO: 417 - DNA, 2226 bp, Artificial Sequence
  Description of Artificial Sequence: Synthetic polynucleotide
atgagtacagcagtgttagagaatccaggcctaggtagaaagctgtctgactttggccaggtgagccagggcagcctgagctgctcagttaggggaatttgggcctccagagaaagagatcccaagactgctggtgcttcctggtttcataagctcagtaagaagtctgaattggttggaagctgatgagaatatccaggaagtcaacagacaaatgtcctcaacaattgtttctaagtaggagaacatctgtcctgggtggctttcacaggaatgaatgaccattgctttagggggttggggatctggcctccagaactgccaccaattagctgtgtgtctttggacaagttactgtccctctctgttgtctgtttactcttctgtacactgaaggggttccaatccaggtcttaggattcaaaagcctgtgcatgttccatttttagtactttccacactgtatttctcaatgtctttctgggacattttataaatcatattatatcacctctaaggatctttcagtttgttatatatgtgtctattaagttagattgtgagctcctaaaagataaagcattgtcttattcatctttaaatttctcagagcccaaatagtgcctggaacctagtagttgctcaataaaaggtattgaatttacaggattgaatggtgacatcaatgaataattgaagattccttaagctgataactgacccagtagcatcattgatcatttaattgccctggacttacttattttccaccacactacatatttctgtatagaatatatatagctcattgtattgcaagatttaactagaagaaagagttcatgcttgctttgtccatgtaggtttaacaggaatgaattgctaaactgtggaaaatgttttaaacaaatgcatcttatcctgtaggagacctcctacattgaggacaactgcaaccagaatggagccatcagcctgatcttcagcctgaaggaggaggtgggagccctggccaaggtgctgagactgtttgaggagaatgatgtgaacctgacccacattgagtccagaccctccagactgaagaaggatgagtatgagttcttcacccacctggacaagagatccctgcctgctctgaccaacatcatcaagatcctgagacatgatattggagccacagtgcatgagctgagcagggacaagaagaaggacacagtgccttggttccccagaaccatccaggagctggacaggtttgccaaccagatcctgtcctatggagctgagctggatgctgaccaccctggatttaaggatcctgtgtacagggccagaaggaagcagtttgctgacattgcctacaactacaggcatggccagcccatccccagggtggagtacatggaggaggagaagaagacctggggcactgtgttcaagaccctgaagagcctgtacaagacccatgcctgctatgagtacaaccacatcttccccctgctggagaagtactgtggcttccatgaggacaacatccctcagctggaggatgtgtcccagttcctgcagacctgcacaggcttcagactgagacctgtggctggcctgctgtctagcagagacttcctgggaggcctggccttcagagtgttccactgcacccagtacatcagacatggaagcaagcccatgtacacccctgagccagacatctgccatgagctgctgggccatgtgcccctgttctctgatagatcctttgcccagttcagccaggagattggcctggccagcctgggagcccctgatgagtacattgagaagctggccaccatctactggttcacagtggagtttggcctgtgcaagcagggagactccatcaaggcctatggagctggactgctgtcctcctttggagagctgcagtactgcctgtctgagaagcccaagctgctgcccctggagctggagaagacagccatccagaactacacagtgacagagttccagcccctgtactatgtggctgagagcttcaatgatgccaaggagaaggtgagaaactttgctgccaccatccccagacccttctctgtgaggtatgacccctacacccagaggattgaggtgctggacaacacccagcagctgaagatcctggctgactccatcaactctgagattggcatcctgtgctctgccctgcagaagatcaagtaa

SEQ ID NO: 418 - DNA, 2226 bp, Artificial Sequence
  Description of Artificial Sequence: Synthetic polynucleotide
atgagtacagcagtgttagagaatccaggcttgggcaggaaactctctgactttggacaggtgagccagggcagcctgagctgctcagttaggggaatttgggcctccagagaaagagatcccaagactgctggtgcttcctggtttcataagctcagtaagaagtctgaattggttggaagctgatgagaatatccaggaagtcaacagacaaatgtcctcaacaattgtttctaagtaggagaacatctgtcctgggtggctttcacaggaatgaatgaccattgctttagggggttggggatctggcctccagaactgccaccaattagctgtgtgtctttggacaagttactgtccctctctgttgtctgtttactcttctgtacactgaaggggttccaatccaggtcttaggattcaaaagcctgtgcatgttccatttttagtactttccacactgtatttctcaatgtctttctgggacattttataaatcatattatatcacctctaaggatctttcagtttgttatatatgtgtctattaagttagattgtgagctcctaaaagataaagcattgtcttattcatctttaaatttctcagagcccaaatagtgcctggaacctagtagttgctcaataaaaggtattgaatttacaggattgaatggtgacatcaatgaataattgaagattccttaagctgataactgacccagtagcatcattgatcatttaattgccctggacttacttattttccaccacactacatatttctgtatagaatatatatagctcattgtattgcaagatttaactagaagaaagagttcatgcttgctttgtccatgtaggtttaacaggaatgaattgctaaactgtggaaaatgttttaaacaaatgcatcttatcctgtaggaaacaagctatattgaagacaactgcaatcaaaatggagccatcagcctgatcttcagcctgaaggaggaggtgggagccctggccaaggtgctgagactgtttgaggagaatgatgtgaacctgacccacattgagtccagaccctccagactgaagaaggatgagtatgagttcttcacccacctggacaagagatccctgcctgctctgaccaacatcatcaagatcctgagacatgatattggagccacagtgcatgagctgagcagggacaagaagaaggacacagtgccttggttccccagaaccatccaggagctggacaggtttgccaaccagatcctgtcctatggagctgagctggatgctgaccaccctggatttaaggatcctgtgtacagggccagaaggaagcagtttgctgacattgcctacaactacaggcatggccagcccatccccagggtggagtacatggaggaggagaagaagacctggggcactgtgttcaagaccctgaagagcctgtacaagacccatgcctgctatgagtacaaccacatcttccccctgctggagaagtactgtggcttccatgaggacaacatccctcagctggaggatgtgtcccagttcctgcagacctgcacaggcttcagactgagacctgtggctggcctgctgtctagcagagacttcctgggaggcctggccttcagagtgttccactgcacccagtacatcagacatggaagcaagcccatgtacacccctgagccagacatctgccatgagctgctgggccatgtgcccctgttctctgatagatcctttgcccagttcagccaggagattggcctggccagcctgggagcccctgatgagtacattgagaagctggccaccatctactggttcacagtggagtttggcctgtgcaagcagggagactccatcaaggcctatggagctggactgctgtcctcctttggagagctgcagtactgcctgtctgagaagcccaagctgctgcccctggagctggagaagacagccatccagaactacacagtgacagagttccagcccctgtactatgtggctgagagcttcaatgatgccaaggagaaggtgagaaactttgctgccaccatccccagacccttctctgtgaggtatgacccctacacccagaggattgaggtgctggacaacacccagcagctgaagatcctggctgactccatcaactctgagattggcatcctgtgctctgccctgcagaagatcaagtaa

SEQ ID NO: 419 - DNA, 2179 bp, Artificial Sequence
  Description of Artificial Sequence: Synthetic polynucleotide
atgagtacagcagtgttagagaatccaggcctaggtagaaagctgtctgactttggccaggtaagcctgttgggcttccactgctaggagagaattggttccccacatgtgaaagcagtctgggaaatgctggtatttccagtctcctaaggctactaagaaatatgactttatttagaggcgaggaaaatgcccaggaagtcaactgatgagtctagtcttaacaagttgaggatacagaaagttggggatctgagctgctaccaacatctgtgtgtctttgggtggctcattggtatcctctgcctattggctttatcttctgtacactgaaaggaaatggctggtccttagtcacctacccaggtcttggatccatagcctacggatgtcccatttttattgctttttatattttgtctcccagtgtctttttgaggattttttttttttttttgcatcacttgctcttcctctaagaatctcctgacttcttgtacatgtgtctgatggtcagaattttagcactgaagtatgggcgtatttatcataattcaggtttatatcctttcagatatgggctagggtctggtattagggtgctcattaaaaaatgttgatttttgtcagtgtctagtgacatcaatgcataatttaaggttctataaattgaaagctaacccaggagtgactcatcctctcattgttttcaacttacttatttctgatcacactgacttccctgtggaatacacgtggttcactgtgttccaaagcttaacgagcagaaaaaggttatgctcgtctcttcttgagaggttttaagagaataattgctaagctgtgaaaaacattttaaccaagtgatctaattatgtaggagacctcctacattgaggacaactgcaaccagaatggagccatcagcctgatcttcagcctgaaggaggaggtgggagccctggccaaggtgctgagactgtttgaggagaatgatgtgaacctgacccacattgagtccagaccctccagactgaagaaggatgagtatgagttcttcacccacctggacaagagatccctgcctgctctgaccaacatcatcaagatcctgagacatgatattggagccacagtgcatgagctgagcagggacaagaagaaggacacagtgccttggttccccagaaccatccaggagctggacaggtttgccaaccagatcctgtcctatggagctgagctggatgctgaccaccctggatttaaggatcctgtgtacagggccagaaggaagcagtttgctgacattgcctacaactacaggcatggccagcccatccccagggtggagtacatggaggaggagaagaagacctggggcactgtgttcaagaccctgaagagcctgtacaagacccatgcctgctatgagtacaaccacatcttccccctgctggagaagtactgtggcttccatgaggacaacatccctcagctggaggatgtgtcccagttcctgcagacctgcacaggcttcagactgagacctgtggctggcctgctgtctagcagagacttcctgggaggcctggccttcagagtgttccactgcacccagtacatcagacatggaagcaagcccatgtacacccctgagccagacatctgccatgagctgctgggccatgtgcccctgttctctgatagatcctttgcccagttcagccaggagattggcctggccagcctgggagcccctgatgagtacattgagaagctggccaccatctactggttcacagtggagtttggcctgtgcaagcagggagactccatcaaggcctatggagctggactgctgtcctcctttggagagctgcagtactgcctgtctgagaagcccaagctgctgcccctggagctggagaagacagccatccagaactacacagtgacagagttccagcccctgtactatgtggctgagagcttcaatgatgccaaggagaaggtgagaaactttgctgccaccatccccagacccttctctgtgaggtatgacccctacacccagaggattgaggtgctggacaacacccagcagctgaagatcctggctgactccatcaactctgagattggcatcctgtgctctgccctgcagaagatcaagtaa

SEQ ID NO: 420 - DNA, 2179 bp, Artificial Sequence
  Description of Artificial Sequence: Synthetic polynucleotide
atgagtacagcagtgttagagaatccaggcttgggcaggaaactctctgactttggacaggtaagcctgttgggcttccactgctaggagagaattggttccccacatgtgaaagcagtctgggaaatgctggtatttccagtctcctaaggctactaagaaatatgactttatttagaggcgaggaaaatgcccaggaagtcaactgatgagtctagtcttaacaagttgaggatacagaaagttggggatctgagctgctaccaacatctgtgtgtctttgggtggctcattggtatcctctgcctattggctttatcttctgtacactgaaaggaaatggctggtccttagtcacctacccaggtcttggatccatagcctacggatgtcccatttttattgctttttatattttgtctcccagtgtctttttgaggattttttttttttttttgcatcacttgctcttcctctaagaatctcctgacttcttgtacatgtgtctgatggtcagaattttagcactgaagtatgggcgtatttatcataattcaggtttatatcctttcagatatgggctagggtctggtattagggtgctcattaaaaaatgttgatttttgtcagtgtctagtgacatcaatgcataatttaaggttctataaattgaaagctaacccaggagtgactcatcctctcattgttttcaacttacttatttctgatcacactgacttccctgtggaatacacgtggttcactgtgttccaaagcttaacgagcagaaaaaggttatgctcgtctcttcttgagaggttttaagagaataattgctaagctgtgaaaaacattttaaccaagtgatctaattatgtaggaaacaagctatattgaagacaactgcaatcaaaatggagccatcagcctgatcttcagcctgaaggaggaggtgggagccctggccaaggtgctgagactgtttgaggagaatgatgtgaacctgacccacattgagtccagaccctccagactgaagaaggatgagtatgagttcttcacccacctggacaagagatccctgcctgctctgaccaacatcatcaagatcctgagacatgatattggagccacagtgcatgagctgagcagggacaagaagaaggacacagtgccttggttccccagaaccatccaggagctggacaggtttgccaaccagatcctgtcctatggagctgagctggatgctgaccaccctggatttaaggatcctgtgtacagggccagaaggaagcagtttgctgacattgcctacaactacaggcatggccagcccatccccagggtggagtacatggaggaggagaagaagacctggggcactgtgttcaagaccctgaagagcctgtacaagacccatgcctgctatgagtacaaccacatcttccccctgctggagaagtactgtggcttccatgaggacaacatccctcagctggaggatgtgtcccagttcctgcagacctgcacaggcttcagactgagacctgtggctggcctgctgtctagcagagacttcctgggaggcctggccttcagagtgttccactgcacccagtacatcagacatggaagcaagcccatgtacacccctgagccagacatctgccatgagctgctgggccatgtgcccctgttctctgatagatcctttgcccagttcagccaggagattggcctggccagcctgggagcccctgatgagtacattgagaagctggccaccatctactggttcacagtggagtttggcctgtgcaagcagggagactccatcaaggcctatggagctggactgctgtcctcctttggagagctgcagtactgcctgtctgagaagcccaagctgctgcccctggagctggagaagacagccatccagaactacacagtgacagagttccagcccctgtactatgtggctgagagcttcaatgatgccaaggagaaggtgagaaactttgctgccaccatccccagacccttctctgtgaggtatgacccctacacccagaggattgaggtgctggacaacacccagcagctgaagatcctggctgactccatcaactctgagattggcatcctgtgctctgccctgcagaagatcaagtaa

SEQ ID NO: 421 - DNA, 1588 bp, Artificial Sequence
  Description of Artificial Sequence: Synthetic polynucleotide
atgagtacagcagtgttagagaatccaggcctaggtagaaagctgtctgactttggccaggtgagccacggcagcctgagctgctcagttaggggaatttgggcctccagagaaagagatccgaagactgctggtgcttcctggtttcataagctcagtaagaagtctgaattcgttggaagctgatgatagaagaaagagttcatgcttgctttgtccatggaggtttaacaggaatgaattgctaaactgtggaaaatgttttaaacaaatgcatcttatcctgtaggagacctcctacattgaggacaactgcaaccagaatggagccatcagcctgatcttcagcctgaaggaggaggtgggagccctggccaaggtgctgagactgtttgaggagaatgatgtgaacctgacccacattgagtccagaccctccagactgaagaaggatgagtatgagttcttcacccacctggacaagagatccctgcctgctctgaccaacatcatcaagatcctgagacatgatattggagccacagtgcatgagctgagcagggacaagaagaaggacacagtgccttggttccccagaaccatccaggagctggacaggtttgccaaccagatcctgtcctatggagctgagctggatgctgaccaccctggatttaaggatcctgtgtacagggccagaaggaagcagtttgctgacattgcctacaactacaggcatggccagcccatccccagggtggagtacatggaggaggagaagaagacctggggcactgtgttcaagaccctgaagagcctgtacaagacccatgcctgctatgagtacaaccacatcttccccctgctggagaagtactgtggcttccatgaggacaacatccctcagctggaggatgtgtcccagttcctgcagacctgcacaggcttcagactgagacctgtggctggcctgctgtctagcagagacttcctgggaggcctggccttcagagtgttccactgcacccagtacatcagacatggaagcaagcccatgtacacccctgagccagacatctgccatgagctgctgggccatgtgcccctgttctctgatagatcctttgcccagttcagccaggagattggcctggccagcctgggagcccctgatgagtacattgagaagctggccaccatctactggttcacagtggagtttggcctgtgcaagcagggagactccatcaaggcctatggagctggactgctgtcctcctttggagagctgcagtactgcctgtctgagaagcccaagctgctgcccctggagctggagaagacagccatccagaactacacagtgacagagttccagcccctgtactatgtggctgagagcttcaatgatgccaaggagaaggtgagaaactttgctgccaccatccccagacccttctctgtgaggtatgacccctacacccagaggattgaggtgctggacaacacccagcagctgaagatcctggctgactccatcaactctgagattggcatcctgtgctctgccctgcagaagatcaagtaa

SEQ ID NO: 422 - DNA, 1588 bp, Artificial Sequence
  Description of Artificial Sequence: Synthetic polynucleotide
atgagtacagcagtgttagagaatccaggcttgggcaggaaactctctgactttggacaggtgagccacggcagcctgagctgctcagttaggggaatttgggcctccagagaaagagatccgaagactgctggtgcttcctggtttcataagctcagtaagaagtctgaattcgttggaagctgatgatagaagaaagagttcatgcttgctttgtccatggaggtttaacaggaatgaattgctaaactgtggaaaatgttttaaacaaatgcatcttatcctgtaggaaacaagctatattgaagacaactgcaatcaaaatggagccatcagcctgatcttcagcctgaaggaggaggtgggagccctggccaaggtgctgagactgtttgaggagaatgatgtgaacctgacccacattgagtccagaccctccagactgaagaaggatgagtatgagttcttcacccacctggacaagagatccctgcctgctctgaccaacatcatcaagatcctgagacatgatattggagccacagtgcatgagctgagcagggacaagaagaaggacacagtgccttggttccccagaaccatccaggagctggacaggtttgccaaccagatcctgtcctatggagctgagctggatgctgaccaccctggatttaaggatcctgtgtacagggccagaaggaagcagtttgctgacattgcctacaactacaggcatggccagcccatccccagggtggagtacatggaggaggagaagaagacctggggcactgtgttcaagaccctgaagagcctgtacaagacccatgcctgctatgagtacaaccacatcttccccctgctggagaagtactgtggcttccatgaggacaacatccctcagctggaggatgtgtcccagttcctgcagacctgcacaggcttcagactgagacctgtggctggcctgctgtctagcagagacttcctgggaggcctggccttcagagtgttccactgcacccagtacatcagacatggaagcaagcccatgtacacccctgagccagacatctgccatgagctgctgggccatgtgcccctgttctctgatagatcctttgcccagttcagccaggagattggcctggccagcctgggagcccctgatgagtacattgagaagctggccaccatctactggttcacagtggagtttggcctgtgcaagcagggagactccatcaaggcctatggagctggactgctgtcctcctttggagagctgcagtactgcctgtctgagaagcccaagctgctgcccctggagctggagaagacagccatccagaactacacagtgacagagttccagcccctgtactatgtggctgagagcttcaatgatgccaaggagaaggtgagaaactttgctgccaccatccccagacccttctctgtgaggtatgacccctacacccagaggattgaggtgctggacaacacccagcagctgaagatcctggctgactccatcaactctgagattggcatcctgtgctctgccctgcagaagatcaagtaa

SEQ ID NO: 423 - DNA, 1588 bp, Artificial Sequence
  Description of Artificial Sequence: Synthetic polynucleotide
atgagtacagcagtgttagagaatccaggcttgggcaggaaactctctgactttggacaggtgagccagggcagcctgagctgctcagttaggggaatttgggcctccagagaaagagatctgaagactgctggtgcttcctggtttcataagctcagtaagaagtctgaattcattggaagctgatgatagaagaaagagttcatgcttgctttgtccatggaggtttaacaggaatgaattgctaaactgtggaaaatgttttaaacaaatgcatcttatcctgtaggaaacaagctatattgaagacaactgcaatcaaaatggagccatcagcctgatcttcagcctgaaggaggaggtgggagccctggccaaggtgctgagactgtttgaggagaatgatgtgaacctgacccacattgagtccagaccctccagactgaagaaggatgagtatgagttcttcacccacctggacaagagatccctgcctgctctgaccaacatcatcaagatcctgagacatgatattggagccacagtgcatgagctgagcagggacaagaagaaggacacagtgccttggttccccagaaccatccaggagctggacaggtttgccaaccagatcctgtcctatggagctgagctggatgctgaccaccctggatttaaggatcctgtgtacagggccagaaggaagcagtttgctgacattgcctacaactacaggcatggccagcccatccccagggtggagtacatggaggaggagaagaagacctggggcactgtgttcaagaccctgaagagcctgtacaagacccatgcctgctatgagtacaaccacatcttccccctgctggagaagtactgtggcttccatgaggacaacatccctcagctggaggatgtgtcccagttcctgcagacctgcacaggcttcagactgagacctgtggctggcctgctgtctagcagagacttcctgggaggcctggccttcagagtgttccactgcacccagtacatcagacatggaagcaagcccatgtacacccctgagccagacatctgccatgagctgctgggccatgtgcccctgttctctgatagatcctttgcccagttcagccaggagattggcctggccagcctgggagcccctgatgagtacattgagaagctggccaccatctactggttcacagtggagtttggcctgtgcaagcagggagactccatcaaggcctatggagctggactgctgtcctcctttggagagctgcagtactgcctgtctgagaagcccaagctgctgcccctggagctggagaagacagccatccagaactacacagtgacagagttccagcccctgtactatgtggctgagagcttcaatgatgccaaggagaaggtgagaaactttgctgccaccatccccagacccttctctgtgaggtatgacccctacacccagaggattgaggtgctggacaacacccagcagctgaagatcctggctgactccatcaactctgagattggcatcctgtgctctgccctgcagaagatcaagtaa

SEQ ID NO: 424 - DNA, 2226 bp, Artificial Sequence
  Description of Artificial Sequence: Synthetic polynucleotide
atgtccacagctgtgctggagaaccctggcctgggcagaaagctgtctgactttggccaggtgagccagggcagcctgagctgctcagttaggggaatttgggcctccagagaaagagatcccaagactgctggtgcttcctggtttcataagctcagtaagaagtctgaattggttggaagctgatgagaatatccaggaagtcaacagacaaatgtcctcaacaattgtttctaagtaggagaacatctgtcctgggtggctttcacaggaatgaatgaccattgctttagggggttggggatctggcctccagaactgccaccaattagctgtgtgtctttggacaagttactgtccctctctgttgtctgtttactcttctgtacactgaaggggttccaatccaggtcttaggattcaaaagcctgtgcatgttccatttttagtactttccacactgtatttctcaatgtctttctgggacattttataaatcatattatatcacctctaaggatctttcagtttgttatatatgtgtctattaagttagattgtgagctcctaaaagataaagcattgtcttattcatctttaaatttctcagagcccaaatagtgcctggaacctagtagttgctcaataaaaggtattgaatttacaggattgaatggtgacatcaatgaataattgaagattccttaagctgataactgacccagtagcatcattgatcatttaattgccctggacttacttattttccaccacactacatatttctgtatagaatatatatagctcattgtattgcaagatttaactagaagaaagagttcatgcttgctttgtccatgtaggtttaacaggaatgaattgctaaactgtggaaaatgttttaaacaaatgcatcttatcctgtaggagacctcctacattgaggacaactgcaaccagaatggagccatctccctgatcttctccctgaaggaggaggtgggagccctggccaaggtgctgagactgtttgaggagaatgatgtgaacctgacccacattgagtccagaccctccagactgaagaaggatgagtatgagttcttcacccacctggacaagagatccctgcctgccctgaccaacatcatcaagatcctgagacatgacattggagccacagtgcatgagctgtccagagacaagaagaaggacacagtgccctggttccccagaaccatccaggagctggacagatttgccaaccagatcctgtcctatggagctgagctggatgctgaccaccctggcttcaaggaccctgtgtacagggccagaagaaagcagtttgctgacattgcctacaactacagacatggccagcccatccccagagtggagtacatggaggaggagaagaagacctggggcacagtgttcaagaccctgaagtccctgtacaagacccatgcctgctatgagtacaaccacatcttccccctgctggagaagtactgtggcttccatgaggacaacatcccccagctggaggatgtgtcccagttcctgcagacctgcacaggcttcagactgagacctgtggctggcctgctgtcctccagagacttcctgggaggcctggccttcagagtgttccactgcacccagtacatcagacatggctccaagcccatgtacacccctgagcctgacatctgccatgagctgctgggccatgtgcccctgttctctgacagatcctttgcccagttctcccaggagattggcctggcctccctgggagcccctgatgagtacattgagaagctggccaccatctactggttcacagtggagtttggcctgtgcaagcagggagactccatcaaggcctatggagctggcctgctgtcctcctttggagagctgcagtactgcctgtctgagaagcccaagctgctgcccctggagctggagaagacagccatccagaactacacagtgacagagttccagcccctgtactatgtggctgagtccttcaatgatgccaaggagaaggtcagaaactttgctgccaccatccccagacccttctctgtgagatatgacccctacacccagagaattgaggtgctggacaacacccagcagctgaagatcctggctgactccatcaactctgagattggcatcctgtgctctgccctgcagaagatcaagtaa

SEQ ID NO: 425 - DNA, 2226 bp, Artificial Sequence
  Description of Artificial Sequence: Synthetic polynucleotide
atgtccacagctgtgctggagaaccctggcttgggcaggaaactctctgactttggacaggtgagccagggcagcctgagctgctcagttaggggaatttgggcctccagagaaagagatcccaagactgctggtgcttcctggtttcataagctcagtaagaagtctgaattggttggaagctgatgagaatatccaggaagtcaacagacaaatgtcctcaacaattgtttctaagtaggagaacatctgtcctgggtggctttcacaggaatgaatgaccattgctttagggggttggggatctggcctccagaactgccaccaattagctgtgtgtctttggacaagttactgtccctctctgttgtctgtttactcttctgtacactgaaggggttccaatccaggtcttaggattcaaaagcctgtgcatgttccatttttagtactttccacactgtatttctcaatgtctttctgggacattttataaatcatattatatcacctctaaggatctttcagtttgttatatatgtgtctattaagttagattgtgagctcctaaaagataaagcattgtcttattcatctttaaatttctcagagcccaaatagtgcctggaacctagtagttgctcaataaaaggtattgaatttacaggattgaatggtgacatcaatgaataattgaagattccttaagctgataactgacccagtagcatcattgatcatttaattgccctggacttacttattttccaccacactacatatttctgtatagaatatatatagctcattgtattgcaagatttaactagaagaaagagttcatgcttgctttgtccatgtaggtttaacaggaatgaattgctaaactgtggaaaatgttttaaacaaatgcatcttatcctgtaggaaacaagctatattgaagacaactgcaatcaaaatggagccatctccctgatcttctccctgaaggaggaggtgggagccctggccaaggtgctgagactgtttgaggagaatgatgtgaacctgacccacattgagtccagaccctccagactgaagaaggatgagtatgagttcttcacccacctggacaagagatccctgcctgccctgaccaacatcatcaagatcctgagacatgacattggagccacagtgcatgagctgtccagagacaagaagaaggacacagtgccctggttccccagaaccatccaggagctggacagatttgccaaccagatcctgtcctatggagctgagctggatgctgaccaccctggcttcaaggaccctgtgtacagggccagaagaaagcagtttgctgacattgcctacaactacagacatggccagcccatccccagagtggagtacatggaggaggagaagaagacctggggcacagtgttcaagaccctgaagtccctgtacaagacccatgcctgctatgagtacaaccacatcttccccctgctggagaagtactgtggcttccatgaggacaacatcccccagctggaggatgtgtcccagttcctgcagacctgcacaggcttcagactgagacctgtggctggcctgctgtcctccagagacttcctgggaggcctggccttcagagtgttccactgcacccagtacatcagacatggctccaagcccatgtacacccctgagcctgacatctgccatgagctgctgggccatgtgcccctgttctctgacagatcctttgcccagttctcccaggagattggcctggcctccctgggagcccctgatgagtacattgagaagctggccaccatctactggttcacagtggagtttggcctgtgcaagcagggagactccatcaaggcctatggagctggcctgctgtcctcctttggagagctgcagtactgcctgtctgagaagcccaagctgctgcccctggagctggagaagacagccatccagaactacacagtgacagagttccagcccctgtactatgtggctgagtccttcaatgatgccaaggagaaggtcagaaactttgctgccaccatccccagacccttctctgtgagatatgacccctacacccagagaattgaggtgctggacaacacccagcagctgaagatcctggctgactccatcaactctgagattggcatcctgtgctctgccctgcagaagatcaagtaa

SEQ ID NO: 426 - DNA, 2179 bp, Artificial Sequence
  Description of Artificial Sequence: Synthetic polynucleotide
atgtccacagctgtgctggagaaccctggcctgggcagaaagctgtctgactttggccaggtaagcctgttgggcttccactgctaggagagaattggttccccacatgtgaaagcagtctgggaaatgctggtatttccagtctcctaaggctactaagaaatatgactttatttagaggcgaggaaaatgcccaggaagtcaactgatgagtctagtcttaacaagttgaggatacagaaagttggggatctgagctgctaccaacatctgtgtgtctttgggtggctcattggtatcctctgcctattggctttatcttctgtacactgaaaggaaatggctggtccttagtcacctacccaggtcttggatccatagcctacggatgtcccatttttattgctttttatattttgtctcccagtgtctttttgaggattttttttttttttttgcatcacttgctcttcctctaagaatctcctgacttcttgtacatgtgtctgatggtcagaattttagcactgaagtatgggcgtatttatcataattcaggtttatatcctttcagatatgggctagggtctggtattagggtgctcattaaaaaatgttgatttttgtcagtgtctagtgacatcaatgcataatttaaggttctataaattgaaagctaacccaggagtgactcatcctctcattgttttcaacttacttatttctgatcacactgacttccctgtggaatacacgtggttcactgtgttccaaagcttaacgagcagaaaaaggttatgctcgtctcttcttgagaggttttaagagaataattgctaagctgtgaaaaacattttaaccaagtgatctaattatgtaggagacctcctacattgaggacaactgcaaccagaatggagccatctccctgatcttctccctgaaggaggaggtgggagccctggccaaggtgctgagactgtttgaggagaatgatgtgaacctgacccacattgagtccagaccctccagactgaagaaggatgagtatgagttcttcacccacctggacaagagatccctgcctgccctgaccaacatcatcaagatcctgagacatgacattggagccacagtgcatgagctgtccagagacaagaagaaggacacagtgccctggttccccagaaccatccaggagctggacagatttgccaaccagatcctgtcctatggagctgagctggatgctgaccaccctggcttcaaggaccctgtgtacagggccagaagaaagcagtttgctgacattgcctacaactacagacatggccagcccatccccagagtggagtacatggaggaggagaagaagacctggggcacagtgttcaagaccctgaagtccctgtacaagacccatgcctgctatgagtacaaccacatcttccccctgctggagaagtactgtggcttccatgaggacaacatcccccagctggaggatgtgtcccagttcctgcagacctgcacaggcttcagactgagacctgtggctggcctgctgtcctccagagacttcctgggaggcctggccttcagagtgttccactgcacccagtacatcagacatggctccaagcccatgtacacccctgagcctgacatctgccatgagctgctgggccatgtgcccctgttctctgacagatcctttgcccagttctcccaggagattggcctggcctccctgggagcccctgatgagtacattgagaagctggccaccatctactggttcacagtggagtttggcctgtgcaagcagggagactccatcaaggcctatggagctggcctgctgtcctcctttggagagctgcagtactgcctgtctgagaagcccaagctgctgcccctggagctggagaagacagccatccagaactacacagtgacagagttccagcccctgtactatgtggctgagtccttcaatgatgccaaggagaaggtcagaaactttgctgccaccatccccagacccttctctgtgagatatgacccctacacccagagaattgaggtgctggacaacacccagcagctgaagatcctggctgactccatcaactctgagattggcatcctgtgctctgccctgcagaagatcaagtaa

SEQ ID NO: 427 - DNA, 2179 bp, Artificial Sequence
  Description of Artificial Sequence: Synthetic polynucleotide
atgtccacagctgtgctggagaaccctggcttgggcaggaaactctctgactttggacaggtaagcctgttgggcttccactgctaggagagaattggttccccacatgtgaaagcagtctgggaaatgctggtatttccagtctcctaaggctactaagaaatatgactttatttagaggcgaggaaaatgcccaggaagtcaactgatgagtctagtcttaacaagttgaggatacagaaagttggggatctgagctgctaccaacatctgtgtgtctttgggtggctcattggtatcctctgcctattggctttatcttctgtacactgaaaggaaatggctggtccttagtcacctacccaggtcttggatccatagcctacggatgtcccatttttattgctttttatattttgtctcccagtgtctttttgaggattttttttttttttttgcatcacttgctcttcctctaagaatctcctgacttcttgtacatgtgtctgatggtcagaattttagcactgaagtatgggcgtatttatcataattcaggtttatatcctttcagatatgggctagggtctggtattagggtgctcattaaaaaatgttgatttttgtcagtgtctagtgacatcaatgcataatttaaggttctataaattgaaagctaacccaggagtgactcatcctctcattgttttcaacttacttatttctgatcacactgacttccctgtggaatacacgtggttcactgtgttccaaagcttaacgagcagaaaaaggttatgctcgtctcttcttgagaggttttaagagaataattgctaagctgtgaaaaacattttaaccaagtgatctaattatgtaggaaacaagctatattgaagacaactgcaatcaaaatggagccatctccctgatcttctccctgaaggaggaggtgggagccctggccaaggtgctgagactgtttgaggagaatgatgtgaacctgacccacattgagtccagaccctccagactgaagaaggatgagtatgagttcttcacccacctggacaagagatccctgcctgccctgaccaacatcatcaagatcctgagacatgacattggagccacagtgcatgagctgtccagagacaagaagaaggacacagtgccctggttccccagaaccatccaggagctggacagatttgccaaccagatcctgtcctatggagctgagctggatgctgaccaccctggcttcaaggaccctgtgtacagggccagaagaaagcagtttgctgacattgcctacaactacagacatggccagcccatccccagagtggagtacatggaggaggagaagaagacctggggcacagtgttcaagaccctgaagtccctgtacaagacccatgcctgctatgagtacaaccacatcttccccctgctggagaagtactgtggcttccatgaggacaacatcccccagctggaggatgtgtcccagttcctgcagacctgcacaggcttcagactgagacctgtggctggcctgctgtcctccagagacttcctgggaggcctggccttcagagtgttccactgcacccagtacatcagacatggctccaagcccatgtacacccctgagcctgacatctgccatgagctgctgggccatgtgcccctgttctctgacagatcctttgcccagttctcccaggagattggcctggcctccctgggagcccctgatgagtacattgagaagctggccaccatctactggttcacagtggagtttggcctgtgcaagcagggagactccatcaaggcctatggagctggcctgctgtcctcctttggagagctgcagtactgcctgtctgagaagcccaagctgctgcccctggagctggagaagacagccatccagaactacacagtgacagagttccagcccctgtactatgtggctgagtccttcaatgatgccaaggagaaggtcagaaactttgctgccaccatccccagacccttctctgtgagatatgacccctacacccagagaattgaggtgctggacaacacccagcagctgaagatcctggctgactccatcaactctgagattggcatcctgtgctctgccctgcagaagatcaagtaa

SEQ ID NO: 428 - DNA, 1588 bp, Artificial Sequence
  Description of Artificial Sequence: Synthetic polynucleotide
atgtccacagctgtgctggagaaccctggcctgggcagaaagctgtctgactttggccaggtgagccacggcagcctgagctgctcagttaggggaatttgggcctccagagaaagagatccgaagactgctggtgcttcctggtttcataagctcagtaagaagtctgaattcgttggaagctgatgatagaagaaagagttcatgcttgctttgtccatggaggtttaacaggaatgaattgctaaactgtggaaaatgttttaaacaaatgcatcttatcctgtaggagacctcctacattgaggacaactgcaaccagaatggagccatctccctgatcttctccctgaaggaggaggtgggagccctggccaaggtgctgagactgtttgaggagaatgatgtgaacctgacccacattgagtccagaccctccagactgaagaaggatgagtatgagttcttcacccacctggacaagagatccctgcctgccctgaccaacatcatcaagatcctgagacatgacattggagccacagtgcatgagctgtccagagacaagaagaaggacacagtgccctggttccccagaaccatccaggagctggacagatttgccaaccagatcctgtcctatggagctgagctggatgctgaccaccctggcttcaaggaccctgtgtacagggccagaagaaagcagtttgctgacattgcctacaactacagacatggccagcccatccccagagtggagtacatggaggaggagaagaagacctggggcacagtgttcaagaccctgaagtccctgtacaagacccatgcctgctatgagtacaaccacatcttccccctgctggagaagtactgtggcttccatgaggacaacatcccccagctggaggatgtgtcccagttcctgcagacctgcacaggcttcagactgagacctgtggctggcctgctgtcctccagagacttcctgggaggcctggccttcagagtgttccactgcacccagtacatcagacatggctccaagcccatgtacacccctgagcctgacatctgccatgagctgctgggccatgtgcccctgttctctgacagatcctttgcccagttctcccaggagattggcctggcctccctgggagcccctgatgagtacattgagaagctggccaccatctactggttcacagtggagtttggcctgtgcaagcagggagactccatcaaggcctatggagctggcctgctgtcctcctttggagagctgcagtactgcctgtctgagaagcccaagctgctgcccctggagctggagaagacagccatccagaactacacagtgacagagttccagcccctgtactatgtggctgagtccttcaatgatgccaaggagaaggtcagaaactttgctgccaccatccccagacccttctctgtgagatatgacccctacacccagagaattgaggtgctggacaacacccagcagctgaagatcctggctgactccatcaactctgagattggcatcctgtgctctgccctgcagaagatcaagtaa

SEQ ID NO: 429 - DNA, 1588 bp, Artificial Sequence
  Description of Artificial Sequence: Synthetic polynucleotide
atgtccacagctgtgctggagaaccctggcttgggcaggaaactctctgactttggacaggtgagccacggcagcctgagctgctcagttaggggaatttgggcctccagagaaagagatccgaagactgctggtgcttcctggtttcataagctcagtaagaagtctgaattcgttggaagctgatgatagaagaaagagttcatgcttgctttgtccatggaggtttaacaggaatgaattgctaaactgtggaaaatgttttaaacaaatgcatcttatcctgtaggaaacaagctatattgaagacaactgcaatcaaaatggagccatctccctgatcttctccctgaaggaggaggtgggagccctggccaaggtgctgagactgtttgaggagaatgatgtgaacctgacccacattgagtccagaccctccagactgaagaaggatgagtatgagttcttcacccacctggacaagagatccctgcctgccctgaccaacatcatcaagatcctgagacatgacattggagccacagtgcatgagctgtccagagacaagaagaaggacacagtgccctggttccccagaaccatccaggagctggacagatttgccaaccagatcctgtcctatggagctgagctggatgctgaccaccctggcttcaaggaccctgtgtacagggccagaagaaagcagtttgctgacattgcctacaactacagacatggccagcccatccccagagtggagtacatggaggaggagaagaagacctggggcacagtgttcaagaccctgaagtccctgtacaagacccatgcctgctatgagtacaaccacatcttccccctgctggagaagtactgtggcttccatgaggacaacatcccccagctggaggatgtgtcccagttcctgcagacctgcacaggcttcagactgagacctgtggctggcctgctgtcctccagagacttcctgggaggcctggccttcagagtgttccactgcacccagtacatcagacatggctccaagcccatgtacacccctgagcctgacatctgccatgagctgctgggccatgtgcccctgttctctgacagatcctttgcccagttctcccaggagattggcctggcctccctgggagcccctgatgagtacattgagaagctggccaccatctactggttcacagtggagtttggcctgtgcaagcagggagactccatcaaggcctatggagctggcctgctgtcctcctttggagagctgcagtactgcctgtctgagaagcccaagctgctgcccctggagctggagaagacagccatccagaactacacagtgacagagttccagcccctgtactatgtggctgagtccttcaatgatgccaaggagaaggtcagaaactttgctgccaccatccccagacccttctctgtgagatatgacccctacacccagagaattgaggtgctggacaacacccagcagctgaagatcctggctgactccatcaactctgagattggcatcctgtgctctgccctgcagaagatcaagtaa

SEQ ID NO: 430 - DNA, 1588 bp, Artificial Sequence
  Description of Artificial Sequence: Synthetic polynucleotide
atgtccacagctgtgctggagaaccctggcctgggcagaaagctgtctgactttggccaggtgagccagggcagcctgagctgctcagttaggggaatttgggcctccagagaaagagatctgaagactgctggtgcttcctggtttcataagctcagtaagaagtctgaattcattggaagctgatgatagaagaaagagttcatgcttgctttgtccatggaggtttaacaggaatgaattgctaaactgtggaaaatgttttaaacaaatgcatcttatcctgtaggagacctcctacattgaggacaactgcaaccagaatggagccatctccctgatcttctccctgaaggaggaggtgggagccctggccaaggtgctgagactgtttgaggagaatgatgtgaacctgacccacattgagtccagaccctccagactgaagaaggatgagtatgagttcttcacccacctggacaagagatccctgcctgccctgaccaacatcatcaagatcctgagacatgacattggagccacagtgcatgagctgtccagagacaagaagaaggacacagtgccctggttccccagaaccatccaggagctggacagatttgccaaccagatcctgtcctatggagctgagctggatgctgaccaccctggcttcaaggaccctgtgtacagggccagaagaaagcagtttgctgacattgcctacaactacagacatggccagcccatccccagagtggagtacatggaggaggagaagaagacctggggcacagtgttcaagaccctgaagtccctgtacaagacccatgcctgctatgagtacaaccacatcttccccctgctggagaagtactgtggcttccatgaggacaacatcccccagctggaggatgtgtcccagttcctgcagacctgcacaggcttcagactgagacctgtggctggcctgctgtcctccagagacttcctgggaggcctggccttcagagtgttccactgcacccagtacatcagacatggctccaagcccatgtacacccctgagcctgacatctgccatgagctgctgggccatgtgcccctgttctctgacagatcctttgcccagttctcccaggagattggcctggcctccctgggagcccctgatgagtacattgagaagctggccaccatctactggttcacagtggagtttggcctgtgcaagcagggagactccatcaaggcctatggagctggcctgctgtcctcctttggagagctgcagtactgcctgtctgagaagcccaagctgctgcccctggagctggagaagacagccatccagaactacacagtgacagagttccagcccctgtactatgtggctgagtccttcaatgatgccaaggagaaggtcagaaactttgctgccaccatccccagacccttctctgtgagatatgacccctacacccagagaattgaggtgctggacaacacccagcagctgaagatcctggctgactccatcaactctgagattggcatcctgtgctctgccctgcagaagatcaagtaa

SEQ ID NO: 431 - DNA, 1588 bp, Artificial Sequence
  Description of Artificial Sequence: Synthetic polynucleotide
atgtccacagctgtgctggagaaccctggcttgggcaggaaactctctgactttggacaggtgagccagggcagcctgagctgctcagttaggggaatttgggcctccagagaaagagatctgaagactgctggtgcttcctggtttcataagctcagtaagaagtctgaattcattggaagctgatgatagaagaaagagttcatgcttgctttgtccatggaggtttaacaggaatgaattgctaaactgtggaaaatgttttaaacaaatgcatcttatcctgtaggaaacaagctatattgaagacaactgcaatcaaaatggagccatctccctgatcttctccctgaaggaggaggtgggagccctggccaaggtgctgagactgtttgaggagaatgatgtgaacctgacccacattgagtccagaccctccagactgaagaaggatgagtatgagttcttcacccacctggacaagagatccctgcctgccctgaccaacatcatcaagatcctgagacatgacattggagccacagtgcatgagctgtccagagacaagaagaaggacacagtgccctggttccccagaaccatccaggagctggacagatttgccaaccagatcctgtcctatggagctgagctggatgctgaccaccctggcttcaaggaccctgtgtacagggccagaagaaagcagtttgctgacattgcctacaactacagacatggccagcccatccccagagtggagtacatggaggaggagaagaagacctggggcacagtgttcaagaccctgaagtccctgtacaagacccatgcctgctatgagtacaaccacatcttccccctgctggagaagtactgtggcttccatgaggacaacatcccccagctggaggatgtgtcccagttcctgcagacctgcacaggcttcagactgagacctgtggctggcctgctgtcctccagagacttcctgggaggcctggccttcagagtgttccactgcacccagtacatcagacatggctccaagcccatgtacacccctgagcctgacatctgccatgagctgctgggccatgtgcccctgttctctgacagatcctttgcccagttctcccaggagattggcctggcctccctgggagcccctgatgagtacattgagaagctggccaccatctactggttcacagtggagtttggcctgtgcaagcagggagactccatcaaggcctatggagctggcctgctgtcctcctttggagagctgcagtactgcctgtctgagaagcccaagctgctgcccctggagctggagaagacagccatccagaactacacagtgacagagttccagcccctgtactatgtggctgagtccttcaatgatgccaaggagaaggtcagaaactttgctgccaccatccccagacccttctctgtgagatatgacccctacacccagagaattgaggtgctggacaacacccagcagctgaagatcctggctgactccatcaactctgagattggcatcctgtgctctgccctgcagaagatcaagtaa

SEQ ID NO: 432 - DNA, 1588 bp, Artificial Sequence
  Description of Artificial Sequence: Synthetic polynucleotide
atgagcaccgccgtgctggaaaatcctggcttgggcaggaaactctctgactttggacaggtgagccagggcagcctgagctgctcagttaggggaatttgggcctccagagaaagagatctgaagactgctggtgcttcctggtttcataagctcagtaagaagtctgaattcattggaagctgatgatagaagaaagagttcatgcttgctttgtccatggaggtttaacaggaatgaattgctaaactgtggaaaatgttttaaacaaatgcatcttatcctgtaggaaacaagctatattgaagacaactgcaatcaaaacggcgccatcagcctgatcttcagcctgaaagaagaagtgggcgccctggccaaggtgctgagactgttcgaagagaacgacgtgaacctgacacacatcgagagcagacccagcagactgaagaaggacgagtacgagttcttcacccacctggacaagcggagcctgcctgctctgaccaacatcatcaagatcctgcggcacgacatcggcgccacagtgcacgaactgagccgggacaagaaaaaggacaccgtgccatggttccccagaaccatccaagagctggacagattcgccaaccagatcctgagctatggcgccgagctggacgctgatcaccctggctttaaggaccccgtgtaccgggccagaagaaagcagtttgccgatatcgcctacaactaccggcacggccagcctattcctcgggtcgagtacatggaagaggaaaagaaaacctggggcaccgtgttcaagaccctgaagtccctgtacaagacccacgcctgctacgagtacaaccacatcttcccactgctcgaaaagtactgcggcttccacgaggacaatatccctcagcttgaggacgtgtcccagttcctgcagacctgcaccggctttagactgaggccagttgccggactgctgagcagcagagattttctcggcggcctggccttcagagtgttccactgtacccagtacatcagacacggcagcaagcccatgtacacccctgagcctgatatctgccacgagctgctgggacatgtgcccctgttcagcgatagaagcttcgcccagttcagccaagagatcggactggcttctctgggagcccctgacgagtacattgagaagctggccaccatctactggttcaccgtggaattcggcctgtgcaagcagggcgacagcatcaaagcttatggcgctggcctgctgtctagcttcggcgagctgcagtactgtctgagcgagaagcctaagctgctgcccctggaactggaaaagaccgccatccagaactacaccgtgaccgagttccagcctctgtactacgtggccgagagcttcaacgacgccaaagaaaaagtgcggaacttcgccgccaccattcctcggcctttcagcgtcagatacgacccctacacacagcggatcgaggtgctggacaacacacagcagctgaaaattctggccgactccatcaacagcgagatcggcatcctgtgcagcgccctgcagaaaatcaagtga

SEQ ID NO: 433 - DNA, 2179 bp, Artificial Sequence
  Description of Artificial Sequence: Synthetic polynucleotide
atgagcaccgccgtgctggaaaatcctggcttgggcaggaaactctctgactttggacaggtaagcctgttgggcttccactgctaggagagaattggttccccacatgtgaaagcagtctgggaaatgctggtatttccagtctcctaaggctactaagaaatatgactttatttagaggccaggaaaatgcccaggaagtcaactgatgagtctagtcttaacaagttgaggatacagaaagttggggatctgagctgctaccaacatctgtgtgtctttgggtggctcattggtatcctctgcctattggctttatcttctgtacactgaaaggaaatggctggtccttagtcacctacccaggtcttggatccatagcctagggatgtcccatttttattgctttttatattttgtctcccagtgtctttttgaggattttttttttttttttgcatcacttgctcttcctctaagaatctcctgacttcttgtacatgtgtctgatggtcagaattttagcactgaagtatgggcctatttatcataattcaggtttatatcctttcagatatgggctagggtctggtattagggtgctcattaaaaaatgttgatttttgtcagtgtctagtgacatcaatgcataatttaaggttctataaattgaaagctaacccaggagtgactcatcctctcattgttttcaacttacttatttctgatcacactgacttccctgtggaatacacctggttcactgtgttccaaagcttaaggagcagaaaaaggttatgctcctctcttcttgagaggttttaagagaataattgctaagctgtgaaaaacattttaaccaagtgatctaattatgtaggaaacaagctatattgaagacaactgcaatcaaaacggcgccatcagcctgatcttcagcctgaaagaagaagtgggcgccctggccaaggtgctgagactgttcgaagagaacgacgtgaacctgacacacatcgagagcagacccagcagactgaagaaggacgagtacgagttcttcacccacctggacaagcggagcctgcctgctctgaccaacatcatcaagatcctgcggcacgacatcggcgccacagtgcacgaactgagccgggacaagaaaaaggacaccgtgccatggttccccagaaccatccaagagctggacagattcgccaaccagatcctgagctatggcgccgagctggacgctgatcaccctggctttaaggaccccgtgtaccgggccagaagaaagcagtttgccgatatcgcctacaactaccggcacggccagcctattcctcgggtcgagtacatggaagaggaaaagaaaacctggggcaccgtgttcaagaccctgaagtccctgtacaagacccacgcctgctacgagtacaaccacatcttcccactgctcgaaaagtactgcggcttccacgaggacaatatccctcagcttgaggacgtgtcccagttcctgcagacctgcaccggctttagactgaggccagttgccggactgctgagcagcagagattttctcggcggcctggccttcagagtgttccactgtacccagtacatcagacacggcagcaagcccatgtacacccctgagcctgatatctgccacgagctgctgggacatgtgcccctgttcagcgatagaagcttcgcccagttcagccaagagatcggactggcttctctgggagcccctgacgagtacattgagaagctggccaccatctactggttcaccgtggaattcggcctgtgcaagcagggcgacagcatcaaagcttatggcgctggcctgctgtctagcttcggcgagctgcagtactgtctgagcgagaagcctaagctgctgcccctggaactggaaaagaccgccatccagaactacaccgtgaccgagttccagcctctgtactacgtggccgagagcttcaacgacgccaaagaaaaagtgcggaacttcgccgccaccattcctcggcctttcagcgtcagatacgacccctacacacagcggatcgaggtgctggacaacacacagcagctgaaaattctggccgactccatcaacagcgagatcggcatcctgtgcagcgccctgcagaaaatcaagtga

SEQ ID NO: 434 - DNA, 2226 bp, Artificial Sequence
  Description of Artificial Sequence: Synthetic polynucleotide
atgagcaccgccgtgctggaaaatcctggcttgggcaggaaactctctgactttggacaggtgagccacggcagcctgagctgctcagttaggggaatttgggcctccagagaaagagatccgaagactgctggtgcttcctggtttcataagctcagtaagaagtctgaattcgttggaagctgatgagaatatccaggaagtcaacagacaaatgtcctcaacaattgtttctaagtaggagaacatctgtcctcggtggctttcacaggaatgaatgaccattgctttagggggttggggatctggcctccagaactgccaccaattagctgtgtgtctttggacaagttactgtccctctctgttgtctgtttactcttctgtacactgaaggggttccaatccaggtcttacgattcaaaagcctgtgcatgttccatttttagtactttccacactgtatttctcaatgtctttctgggacattttataaatcatattatatcacctctaaggatctttcagtttgttatatatgtgtctattaagttagattgtgagctcctaaaagataaagcattgtcttattcatctttaaatttctcagagcccaaatagtgcctggaacctagtagttgctcaataaaaggtattgaatttacaggattgaatggtgacatcaatgaataattgaagattccttaagctgataactgacccagtagcatcattgatcatttaattgccctggacttacttattttccaccacactacatatttctgtatagaatatatatagctcattgtattgcaagatttaactagaagaaagagttcatgcttgctttgtccatggaggtttaacaggaatgaattgctaaactgtggaaaatgttttaaacaaatgcatcttatcctgtaggaaacaagctatattgaagacaactgcaatcaaaacggcgccatcagcctgatcttcagcctgaaagaagaagtgggcgccctggccaaggtgctgagactgttcgaagagaacgacgtgaacctgacacacatcgagagcagacccagcagactgaagaaggacgagtacgagttcttcacccacctggacaagcggagcctgcctgctctgaccaacatcatcaagatcctgcggcacgacatcggcgccacagtgcacgaactgagccgggacaagaaaaaggacaccgtgccatggttccccagaaccatccaagagctggacagattcgccaaccagatcctgagctatggcgccgagctggacgctgatcaccctggctttaaggaccccgtgtaccgggccagaagaaagcagtttgccgatatcgcctacaactaccggcacggccagcctattcctcgggtcgagtacatggaagaggaaaagaaaacctggggcaccgtgttcaagaccctgaagtccctgtacaagacccacgcctgctacgagtacaaccacatcttcccactgctcgaaaagtactgcggcttccacgaggacaatatccctcagcttgaggacgtgtcccagttcctgcagacctgcaccggctttagactgaggccagttgccggactgctgagcagcagagattttctcggcggcctggccttcagagtgttccactgtacccagtacatcagacacggcagcaagcccatgtacacccctgagcctgatatctgccacgagctgctgggacatgtgcccctgttcagcgatagaagcttcgcccagttcagccaagagatcggactggcttctctgggagcccctgacgagtacattgagaagctggccaccatctactggttcaccgtggaattcggcctgtgcaagcagggcgacagcatcaaagcttatggcgctggcctgctgtctagcttcggcgagctgcagtactgtctgagcgagaagcctaagctgctgcccctggaactggaaaagaccgccatccagaactacaccgtgaccgagttccagcctctgtactacgtggccgagagcttcaacgacgccaaagaaaaagtgcggaacttcgccgccaccattcctcggcctttcagcgtcagatacgacccctacacacagcggatcgaggtgctggacaacacacagcagctgaaaattctggccgactccatcaacagcgagatcggcatcctgtgcagcgccctgcagaaaatcaagtga

SEQ ID NO: 435 - DNA, 1359 bp, Artificial Sequence
  Description of Artificial Sequence: Synthetic polynucleotide
atgtcaactgcagtgttagagaacccaggccttggtagaaagctttcagactttggacaagaaaccagctacattgaagataactgcaaccagaatggtgccatctccctgatcttcagcctgaaggaagaagtgggagccctggccaaggtcctgaggctctttgaagagaatgatgtgaacctcacccacattgagtccagacccagcaggctcaagaaggatgagtatgaattcttcacccacctggataagaggtccctccctgccctcaccaacatcatcaagatcctgagacatgacattggggccactgtccatgaactgtccagggacaagaagaaggacactgtgccctggttcccaaggaccatccaggaactggacagatttgccaaccaaatcctgtcctatggtgctgagctggatgctgaccaccctggattcaaggaccctgtgtacagagccagaaggaaacagtttgcagacattgcctacaactacagacatgggcagcctatcccaagagtggagtacatggaagaagagaagaaaacctggggcactgtgttcaagacccttaagtccctgtacaagacccatgcctgctatgagtacaaccacatcttccccctgctggagaagtactgtggcttccatgaggacaacatcccccagctggaagatgtgtcccagttcctccaaacttgcactgggttcaggctgaggcctgtggctggcctgctgagctccagagacttcttgggtggactggccttcagagtgttccactgcacccagtacatcagacatggctccaagcccatgtacacccctgagcctgacatctgtcatgaactcctgggccatgtgcccttgttcagtgacagaagctttgcccagttcagccaggaaattggccttgcctccctgggagcccctgatgagtacattgaaaagctagccaccatctactggttcactgtggaatttggcttgtgcaaacagggagactccatcaaggcctatggagctggactgctgtcctcctttggggaactgcagtactgcctctctgagaagcccaagctcctgcccctggaactggagaaaacagccatccagaactacactgtcactgagttccagcccctctactatgtggcagagagcttcaatgatgccaaggaaaaagtcagaaactttgctgccaccatcccaaggccattctcagtcagatatgacccctacacccaaaggattgaagtgctggacaacacccagcagctcaagatcttggcagactccataaactcagagattggaatcctgtgctctgccctgcaaaagattaagtaa

SEQ ID NO: 436 - DNA, 1359 bp, Artificial Sequence
  Description of Artificial Sequence: Synthetic polynucleotide
atgtcaactgctgtgctggaaaaccctggattaggaagaaagctctcagactttggtcaagaaacctcctacattgaggacaactgcaaccagaatggtgccatctccctcatcttctccctgaaagaggaagtgggagccctggccaaggtcctgaggctctttgaggaaaatgatgtcaacctgacccacattgagtccaggcccagcagactgaagaaggatgagtatgaattcttcacccacctggacaagagaagcctccctgccctcaccaacatcatcaagatcctcagacatgacattggagccactgtgcatgaactcagcagagacaagaagaaggacactgtgccatggttccctaggaccatccaggaactggataggtttgccaaccaaatcctctcctatggagcagagctggatgcagaccaccctggattcaaggacccagtgtacagggccaggaggaaacagtttgcagacattgcctacaactacagacatggccagcccatccctagagtggagtacatggaagaagagaagaaaacctggggcactgtgttcaagaccctgaagtccctgtacaagacccatgcctgctatgagtacaaccacatcttccccctgctggagaagtactgtggcttccatgaggacaacatcccccagctggaagatgtgtcccagttcctccaaacttgcactggattcaggcttagacctgtggctggcctgttgagcagcagagacttcctgggagggctggccttcagagtgttccactgtacccagtacatcagacatggctccaagcccatgtacacccctgagcctgacatctgccatgaattgcttggccatgtgcccctgttcagtgatagatcctttgcccaattctcccaagaaattggcctggccagccttggagcccctgatgagtacattgaaaagcttgccaccatctactggttcactgtggaatttggcctgtgcaaacagggggactccataaaggcctatggtgctggactgctgtcctcctttggggaactgcagtactgcttgtcagagaagcccaagttgctgcccctggaactggaaaagacagccatccagaactacactgtcactgagttccagcccctctactatgtggcagagagcttcaatgatgccaaggaaaaagtcagaaactttgctgccaccatcccaaggccattctcagtcagatatgacccatacacccagaggattgaagtgctggacaacacccagcagctgaagatcctggctgactccatcaactcagagattgggatcctgtgctctgccctccaaaagattaagtaa

SEQ ID NO: 437 - DNA, 1359 bp, Artificial Sequence
  Description of Artificial Sequence: Synthetic polynucleotide
atgtccactgctgtccttgaaaaccctggccttggtagaaagctctctgattttggacaagaaaccagctacattgaggacaactgcaaccagaatggtgccatctcactaatcttcagcctgaaggaagaagtgggagccctggccaaggtcttgagactctttgaggaaaatgatgtcaacctcacccacattgagtccaggccatccagactcaagaaggatgagtatgaattcttcacccacctggacaagaggtccttgcctgccctcacaaacatcatcaagatcctgagacatgacattggggccactgtgcatgagctgtccagagacaagaaaaaggacactgtgccttggttcccaagaaccatccaggaactggacagatttgccaaccaaatcctgagctatggggctgagttggatgcagaccaccctggattcaaggacccagtgtacagggccaggagaaagcagtttgcagacattgcctacaactacagacatggccagcccatcccaagggtggagtacatggaagaggaaaagaaaacctggggcactgtgttcaagaccctgaagtccctgtacaagacccatgcctgctatgagtacaaccacatcttccccctcctggaaaagtactgtggcttccatgaggacaacatcccccagctggaagatgtgtcccagttcctccaaacctgtactgggttcaggctgaggcctgtggctggactgctgagctccagggacttcctgggtggactggccttcagggtgttccactgcacccagtacatcagacatggatccaagcccatgtacacccctgagcctgacatttgccatgaactgctgggccatgtgcccttgttcagtgatagaagctttgcccagttctcccaagaaattggcctggcctccctgggagcccctgatgagtacattgaaaagcttgccaccatctactggttcactgtggaatttggcctgtgcaaacagggagactccatcaaggcctatggagctgggctcctgagctcctttggagagctccagtactgcctgtcagagaagcccaagctcctgcccctggaacttgaaaagactgccatccagaactacactgtgactgagttccagcccctgtactatgtggcagagtccttcaatgatgccaaggaaaaagtcagaaactttgctgccaccatcccaagacccttctctgtgagatatgacccctacacccaaaggattgaagtcctggacaacacccagcagctgaagatcctggcagacagcatcaactcagagataggcatcctgtgctcagccctccaaaagattaagtaa

SEQ ID NO: 438 - DNA, 1359 bp, Artificial Sequence
  Description of Artificial Sequence: Synthetic polynucleotide
atgagcactgctgtccttgaaaaccctggccttggaagaaagctctctgactttggacaagaaacctcctacattgaggacaactgcaaccagaatggtgccatctccctcatcttctccctgaaagaggaagtgggagccctggccaaggtcctgaggctctttgaagagaatgatgtgaacctcacccacattgagtccagacccagcaggctcaagaaagatgagtatgaattcttcacccacctggacaagagatccttgcctgccctcaccaacatcatcaagatcctgagacatgacattggagccactgtgcatgaactgtccagggacaagaagaaggacactgtgccctggttcccaaggaccatccaggaacttgacagatttgccaaccaaatcctgtcctatggtgctgagctggatgcagaccaccctggattcaaggacccagtgtacagagccaggagaaagcagtttgctgacatagcctacaactacagacatggccagcccattccaagagtggagtacatggaagaagagaagaaaacctgggggactgtgttcaagaccctgaagtccctgtacaagacccatgcctgctatgagtacaaccacatcttccccctgctggagaagtactgtggcttccatgaggacaacatcccccagctggaagatgtgtcccagttcctgcaaacttgcactgggttcaggctcagacctgtggctggcttactgagctccagggacttcctgggtggactagccttcagggtgttccactgcacccagtacatcagacatggctccaagcccatgtacacccctgagcctgatatctgccatgaactgctgggccatgtgcccttgttcagtgacagaagctttgcccagttctcccaagaaattggccttgcctccctgggggcccctgatgagtacattgaaaagctggccaccatctactggttcactgtggaatttggcttgtgcaaacagggagactccatcaaggcctatggggcaggactgctgagcagctttggagagctgcagtactgcctgtcagagaagcccaagctcctgcccctggaactggaaaagactgccatccagaactacactgtcactgagttccagcccctctactatgtggcagagtccttcaatgatgccaaggaaaaagtcaggaactttgcagccacaatccctagaccattctcagtcagatatgacccatacacccagaggattgaagtgctggacaacacccagcagctcaagatcttggctgatagcatcaactcagagattggaatcctgtgttcagccctccaaaagattaagtaa

SEQ ID NO: 439 - DNA, 1359 bp, Artificial Sequence
  Description of Artificial Sequence: Synthetic polynucleotide
atgtcaaccgccgtgcttgaaaatcctggactcggaaggaaattgtcagactttggacaagaaacctcctatatcgaggacaactgcaaccagaacggcgccatctctctcatcttttcgctgaaagaagaggtcggagccctggccaaggtcctgagactgttcgaagagaatgacgtcaacctcactcacatcgagtcccgcccgtcacggctgaagaaagacgaatacgagttcttcacccatctggataagcgctcgttgcctgcgctgactaacatcataaagattctgcggcacgacatcggcgcgactgtgcacgagctgagccgggataagaagaaggacactgtgccatggttcccccggaccattcaagaactggacagattcgcgaaccagattctgtcctatggcgccgagctggacgctgaccaccccgggttcaaggaccctgtgtaccgcgctagacgcaagcagttcgcagacatcgcctacaactatcggcatgggcagccgattccccgcgtcgagtacatggaagaagagaagaaaacctggggtaccgtgttcaagactctgaagtcgctgtacaagacccacgcatgctacgagtacaaccatatcttcccgctcctcgagaagtactgcggtttccacgaggataacattccccaattggaagatgtgtcccagttcctgcaaacttgcacaggctttaggcttagaccggtggcgggcctcctgagctcccgggatttcctcggcggactcgccttccgggtgttccactgcactcagtacattcggcacgggagcaagccgatgtacacccccgaaccggatatctgtcatgaacttctgggacacgtgccactcttctccgaccgaagcttcgcgcagttctcccaagaaatcggactggcctccctgggtgcccctgatgagtacatcgaaaagcttgccaccatctactggtttaccgtggagttcggcctgtgcaaacagggagacagcatcaaggcatacggggccggcctgctgtcctcgttcggagaactgcagtactgcctgtcggagaagcccaagttgctgcccctcgaactggagaaaacggccatccagaactacaccgtgaccgagttccagccgctgtactacgtggccgaaagcttcaacgacgccaaggaaaaggtccgcaactttgcggctaccatcccgaggcctttctccgtgcgctacgacccatacactcagcggatcgaagtgctggataacacccagcagctgaagatcctcgccgactccattaactccgagattggaatcctgtgttccgctctgcaaaagattaagtga

SEQ ID NO: 440 - DNA, 1359 bp, Artificial Sequence
  Description of Artificial Sequence: Synthetic polynucleotide
atgtcaaccgccgtgctcgagaaccctggacttggaagaaaactgtcagacttcggacaagagacttcttacatcgaggataactgcaaccagaatggcgcgatttcgctgatattcagcctgaaggaagaggtcggagccctggccaaggtcctgcggcttttcgaggaaaacgacgtgaacctgactcacatcgagtcccggccgagcagactcaagaaggacgaatacgaattcttcacccatctcgataagcgctcgctgccggcgcttactaacattatcaagatcctgcgccacgatatcggagccaccgtgcatgaactgtcgagggataagaaaaaggataccgtgccgtggttcccgaggaccatccaggaactggaccgcttcgctaaccaaatcttgagctatggcgcggaactcgacgctgaccaccccgggttcaaggatcccgtgtaccgggccagacgcaagcagttcgcagacattgcctacaactatcgacacggccagcctattccacgggtggagtacatggaagaagagaaaaagacctggggcaccgtgttcaagaccctgaagtccctgtacaagactcacgcctgctacgagtacaaccacatcttccctctgctcgaaaagtactgcgggttccatgaggacaacatccctcagctcgaggacgtgtcacagttcctgcaaacgtgcactggctttcggctgaggccggtggccggtctgctgagctcaagggattttctgggcggactggcgttccgcgtgttccactgcacccagtatatccgccatggtagcaagcccatgtacactccggagcctgacatttgccacgaactactgggacacgtgccgttgtttagcgaccggtcgtttgcccaattctcccaagaaatcggactggcctccctgggggcgccagacgagtacattgaaaagctcgcaaccatctactggttcaccgtggaattcggactgtgcaaacagggcgattcgatcaaggcctacggcgccgggctcctgtcctccttcggtgaactgcagtactgtctgtccgagaagcccaagctcctgcccctcgagcttgaaaagacagctatccagaactacactgtcaccgagttccagccactctactacgtggccgagtccttcaatgacgccaaggaaaaagtccggaacttcgcggcaaccattcctagacccttctccgtgcgctacgacccgtacacccagcggatcgaagtgctggacaacacccagcagttgaagatcctggccgactccatcaactccgaaatcggtattttgtgttccgccctgcaaaagattaagtga

SEQ ID NO: 441 - DNA, 348 bp, Artificial Sequence
  Description of Artificial Sequence: Synthetic polynucleotide
gatcttgctaccagtggaacagccactaaggattctgcagtgagagcagagggccagctaagtggtactctcccagagactgtctgactcacgccaccccctccaccttggacacaggacgctgtggtttctgagccaggtacaatgactcctttcggtaagtgcagtggaagctgtacactgcccaggcaaagcgtccgggcagcgtaggcgggcgactcagatcccagccagtggacttagcccctgtttgctcctccgataactggggtgaccttggttaatattcaccagcagcctcccccgttgcccctctggatccactgcttaaatacggacgaggacagg

SEQ ID NO: 442 - DNA, 202 bp, Artificial Sequence
  Description of Artificial Sequence: Synthetic polynucleotide
gtctgtctgcacatttcgtagagcgagtgttccgatactctaatctccctaggcaaggttcatatttgtgtaggttacttattctccttttgttgactaagtcaataatcagaatcagcaggtttggagtcagcttggcagggatcagcagcctgggttggaaggagggggtataaaagccccttcaccaggagaagccgtc

SEQ ID NO: 443 - DNA, 348 bp, Artificial Sequence
  Description of Artificial Sequence: Synthetic polynucleotide
gatcttgctaccagtggaacagccactaaggattctgcagtgagagcagagggccagctaagtggtactctcccagagactgtctgactcatgccaccccctccaccttggacacaggacactgtggtttctgagccaggtacaatgactccttttggtaagtgcagtggaagctgtacactgcccaggcaaagtgtccgggcagcgtaggcgggcgactcagatcccagccagtggacttagcccctgtttgctcctccgataactggggtgaccttggttaatattcaccagcagcctcccccgttgcccctctggatccactgcttaaatacggacgaggacagg

SEQ ID NO: 444 - DNA, 348 bp, Artificial Sequence
  Description of Artificial Sequence: Synthetic polynucleotide
gatcttgctaccagtggaacagccactaaggattctgcagtgagagcagagggccagctaagtggtactctcccagagactgtctgactcacgccaccccctccaccttggacacaggacgctgtggtttctgagccaggtacaatgactcctttcggtaagtgcagtggaagctgtacactgcccaggcaaagcgtccgggcagcgtaggcgggcgactcagatcccagccagtggacttagcccctgtttgctcctctgataactggggtgaccttggttaatattcaccagcagcctcccctgttgcccctctggatccactgcttaaatacggacaaggacagg

SEQ ID NO: 445 - DNA, 348 bp, Artificial Sequence
  Description of Artificial Sequence: Synthetic polynucleotide
gatcttgctaccagtggaacagccactaaggattctgcagtgagagcagagggccagctaagtggtactctcccagagactgtctgactcacgccaccccctccaccttggacacaggacgctgtggtttctgagccaggtacaatgactcctttcggtaagtgcagtggaagctgtacactgcccaggcaaagcgtctgggcagcataggcaggcgactcagatcccagccagtggacttagcccctgtttgctcctccgataactggggtgaccttggttaatattcaccagcagcctcccccgttgcccctctggatccactgcttaaatacggacgaggacagg

SEQ ID NO: 446 - DNA, 348 bp, Artificial Sequence
  Description of Artificial Sequence: Synthetic polynucleotide
gatcttgctaccagtggaacagccactaaggattctgcagtgagagcagagggccagctaagtggtactctcccagagactgtctgactcacgccaccccctccaccttggacacaggacgctgtggtttctgagccaggtacaatgactcctttcggtaagtgcagtggaagctgtacactgcccaggcaaagcgtccgggcagcgtaggcgggcgactcagatcccagccagtggacttagcccctgtttgctcctctgataactggggtgaccttggttaatattcaccagcagcctcccccgttgcccctctggatccactgcttaaatacagacgaggacagg

SEQ ID NO: 447 - DNA, 348 bp, Artificial Sequence
  Description of Artificial Sequence: Synthetic polynucleotide
gatcttgctaccagtggaacagccactaaggattctgcagtgagagcagagggccagctaagtggtactctcccagagactgtctgactcatgccaccccctccaccttggacacaggacactgtggtttctgagccaggtacaatgactccttttggtaagtgcagtggaagctgtacactgcccaggcaaagtgtctgggcagcataggcaggtgactcagatcccagccagtggacttagcccctgtttgctcctctgataactggggtgaccttggttaatattcaccagcagcctcccctgttgcccctctggatccactgcttaaatacagacaaggacagg

SEQ ID NO: 448 - DNA, 318 bp, Artificial Sequence
  Description of Artificial Sequence: Synthetic polynucleotide
gattctgcagtgagagcagagggccagctaagtggtactctcccagagactgtctgactcacgccaccccctccaccttggacacaggacgctgtggtttctgagccaggtacaatgactcctttcggtaagtgcagtggaagctgtacactgcccaggcaaagcgtccgggcagcgtaggcgggcgactcagatcccagccagtggacttagcccctgtttgctcctccgataactggggtgaccttggttaatattcaccagcagcctcccccgttgcccctctggatccactgcttaaatacggacgaggacagg

SEQ ID NO: 449 - DNA, 72 bp, Artificial Sequence
  Description of Artificial Sequence: Synthetic oligonucleotide
gggggaggctgctggtgaatattaaccaaggtcaccccagttatcggaggagcaaacaggggctaagtccac

SEQ ID NO: 450 - DNA, 100 bp, Artificial Sequence
  Description of Artificial Sequence: Synthetic polynucleotide
cactgggaggatgttgagtaagatggaaaactactgatgacccttgcagagacagagtattaggacatgtttgaacaggggccgggcgatcagcaggtag

SEQ ID NO: 451 - DNA, 13 bp, Artificial Sequence
  Description of Artificial Sequence: Synthetic oligonucleotide
gttaatcattaac

SEQ ID NO: 452 - DNA, 17 bp, Artificial Sequence
  Description of Artificial Sequence: Synthetic oligonucleotide
gcttgtactttggtaca

SEQ ID NO: 453 - DNA, 770 bp, Artificial Sequence
  Description of Artificial Sequence: Synthetic polynucleotide
aggctcagaggcacacaggagtttctgggctcaccctgcccccttccaacccctcagttcccatcctccagcagctgtttgtgtgctgcctctgaagtccacactgaacaaacttcagcctactcatgtccctaaaatgggcaaacattgcaagcagcaaacagcaaacacacagccctccctgcctgctgaccttggagctggggcagaggtcagagacctctctgggcccatgccacctccaacatccactcgaccccttggaatttcggtggagaggagcagaggttgtcctggcgtggtttaggtagtgtgagagggtccgggttcaaaaccacttgctgggtggggagtcgtcagtaagtggctatgccccgaccccgaagcctgtttccccatctgtacaatggaaatgataaagacgcccatctgatagggtttttgtggcaaataaacatttggtttttttgttttgttttgttttgttttttgagatggaggtttgctctgtcgcccaggctggagtgcagtgacacaatctcatctcaccacaaccttcccctgcctcagcctcccaagtagctgggattacaagcatgtgccaccacacctggctaattttctatttttagtagagacgggtttctccatgttggtcagcctcagcctcccaagtaactgggattacaggcctgtgccaccacacccggctaattttttctatttttgacagggacggggtttcaccatgttggtcaggctggtctaga

SEQ ID NO: 454 - DNA, 120 bp, Artificial Sequence
  Description of Artificial Sequence: Synthetic polynucleotide
gcgagaacttgtgcctccccgtgttcctgctctttgtccctctgtcctacttagactaatatttgccttgggtactgcaaacaggaaatgggggagggacaggagtagggcggagggtag

SEQ ID NO: 455 - DNA, 770 bp, Artificial Sequence
  Description of Artificial Sequence: Synthetic polynucleotide
aggctcagaggcacacaggagtttctgggctcaccctgcccccttccaacccctcagttcccatcctccagcagctgtttgtgtgctgcctctgaagtccacactgaacaaacttcagcctactcatgtccctaaaatgggcaaacattgcaagcagcaaacagcaaacacacagccctccctgcctgctgaccttggagctggggcagaggtcagagacctctctgggcccatgccacctccaacatccactcgaccccttggaatttcagtggagaggagcagaggttgtcctggtgtggtttaggtagtgtgagagggtccaggttcaaaaccacttgctgggtggggagttgtcagtaagtggctatgccccgaccccgaagcctgtttccccatctgtacaatggaaatgataaagacgcccatctgatagggtttttgtggcaaataaacatttggtttttttgttttgttttgttttgttttttgagatggaggtttgctctgtcgcccaggctggagtgcagtgacacaatctcatctcaccacaaccttcccctgcctcagcctcccaagtagctgggattacaagcatgtgccaccacacctggctaattttctatttttagtagagacgggtttctccatgttggtcagcctcagcctcccaagtaactgggattacaggcctgtgccaccacacccggctaattttttctatttttgacagggacggggtttcaccatgttggtcaggctggtctaga

SEQ ID NO: 456 - DNA, 770 bp, Artificial Sequence
  Description of Artificial Sequence: Synthetic polynucleotide
aggctcagaggcacacaggagtttctgggctcaccctgcccccttccaacccctcagttcccatcctccagcagctgtttgtgtgctgcctctgaagtccacactgaacaaacttcagcctactcatgtccctaaaatgggcaaacattgcaagcagcaaacagcaaacacacagccctccctgcctgctgaccttggagctggggcagaggtcagagacctctctgggcccatgccacctccaacatccacttgaccccttggaatttcggtggagaggagcagaggttgtcctggcgtggtttaggtagtgtgagagggtccgggttcaaaaccacttgctgggtggggagtcgtcagtaagtggctatgccccaaccctgaagcctgtttccccatctgtacaatggaaatgataaagacccccatctgatagggtttttgtggcaaataaacatttggtttttttgttttgttttgttttgttttttgagatggaggtttgctctgtcgcccaggctggagtgcagtgacacaatctcatctcaccacaaccttcccctgcctcagcctcccaagtagctgggattacaagcatgtgccaccacacctggctaattttctatttttagtagagacgggtttctccatgttggtcagcctcagcctcccaagtaactgggattacaggcctgtgccaccacacccggctaattttttctatttttgacagggacggggtttcaccatgttggtcaggctggtctaga

SEQ ID NO: 457 - DNA, 770 bp, Artificial Sequence
  Description of Artificial Sequence: Synthetic polynucleotide
aggctcagaggcacacaggagtttctgggctcaccctgcccccttccaacccctcagttcccatcctccagcagctgtttgtgtgctgcctctgaagtccacactgaacaaacttcagcctactcatgtccctaaaatgggcaaacattgcaagcagcaaacagcaaacacacagccctccctgcctgctgaccttggagctggggcagaggtcagagacctctctgggcccatgccacctccaacatccactcgaccccttggaatttcggtggagaggagcagaggttgtcctggcgtggtttaggtagtgtgagagggtccgggttcaaaaccacttgctgggtggggagtcgtcagtaagtggctatgccccgaccccgaagcctgtttccccatctgtacaatggaaatgataaagacgcccatctgatagggtttttgtggcaaataaacatttggtttttttgttttgttttgttttgttttttgagatggaggtttgctctgtggcccaggctggagtgcagtgacacaatctcatctcaccacaaccttcccctgcctcagcctcccaagtagctgggattacaagcatgtgccaccacacctggctaattttctatttttagtagagatgggtttctccatgttggtcagcctcagcctcccaagtaactgggattacaggcctgtgccaccacacctggctaattttttctatttttgacagggatggggtttcaccatgttggtcaggctggtctaga

SEQ ID NO: 458 - DNA, 770 bp, Artificial Sequence
  Description of Artificial Sequence: Synthetic polynucleotide
aggctcagaggcacacaggagtttctgggctcaccctgcccccttccaacccctcagttcccatcctccagcagctgtttgtgtgctgcctctgaagtccacactgaacaaacttcagcctactcatgtccctaaaatgggcaaacattgcaagcagcaaacagcaaacacacagccctccctgcctgctgaccttggagctggggcagaggtcagagacctctctgggcccatgccacctccaacatccacttgaccccttggaatttcagtggagaggagcagaggttgtcctggtgtggtttaggtagtgtgagagggtccaggttcaaaaccacttgctgggtggggagttgtcagtaagtggctatgccccaaccctgaagcctgtttccccatctgtacaatggaaatgataaagacccccatctgatagggtttttgtggcaaataaacatttggtttttttgttttgttttgttttgttttttgagatggaggtttgctctgtggcccaggctggagtgcagtgacacaatctcatctcaccacaaccttcccctgcctcagcctcccaagtagctgggattacaagcatgtgccaccacacctggctaattttctatttttagtagagatgggtttctccatgttggtcagcctcagcctcccaagtaactgggattacaggcctgtgccaccacacctggctaattttttctatttttgacagggatggggtttcaccatgttggtcaggctggtctaga

SEQ ID NO: 459 - DNA, 117 bp, Artificial Sequence
  Description of Artificial Sequence: Synthetic polynucleotide
ccctaaaatgggcaaacattgcaagcagcaaacagcaaacacacagccctccctgcctgctgaccttggagctggggcagaggtcagagacctctctgggcccatgccacctccaac

SEQ ID NO: 460 - DNA, 90 bp, Artificial Sequence
  Description of Artificial Sequence: Synthetic oligonucleotide
gttaatcattaacgcttgtactttggtacagttaatcattaacgcttgtactttggtacagttaatcattaacgcttgtactttggtaca

SEQ ID NO: 461 - DNA, 321 bp, Artificial Sequence
  Description of Artificial Sequence: Synthetic polynucleotide
aggctcagaggcacacaggagtttctgggctcaccctgcccccttccaacccctcagttcccatcctccagcagctgtttgtgtgctgcctctgaagtccacactgaacaaacttcagcctactcatgtccctaaaatgggcaaacattgcaagcagcaaacagcaaacacacagccctccctgcctgctgaccttggagctggggcagaggtcagagacctctctgggcccatgccacctccaacatccactcgaccccttggaatttcggtggagaggagcagaggttgtcctggcgtggtttaggtagtgtgagaggg

SEQ ID NO: 462 - DNA, 436 bp, Artificial Sequence
  Description of Artificial Sequence: Synthetic polynucleotide
gttaatcattaacgcttgtactttggtacagttaatcattaacgcttgtactttggtacagttaatcattaacgcttgtactttggtacaatcgatgcgagaacttgtgcctccccgtgttcctgctctttgtccctctgtcctacttagactaatatttgccttgggtactgcaaacaggaaatgggggagggacaggagtagggcggagggtagttaagaatgtggatccccgtctgtctgcacatttcgtagagcgagtgttccgatactctaatctccctaggcaaggttcatatttgtgtaggttacttattctccttttgttgactaagtcaataatcagaatcagcaggtttggagtcagcttggcagggatcagcagcctgggttggaaggagggggtataaaagccccttcaccaggagaagccgtc

SEQ ID NO: 463 - DNA, 773 bp, Artificial Sequence
  Description of Artificial Sequence: Synthetic polynucleotide
gttaatcattaacgcttgtactttggtacagttaatcattaacgcttgtactttggtacagttaatcattaacgcttgtactttggtacaatcgatgcgagaacttgtgcctccccgtgttcctgctctttgtccctctgtcctacttagactaatatttgccttgggtactgcaaacaggaaatgggggagggacaggagtagggcggagggtagttaagaatgtcaattggggggaggctgctggtgaatattaaccaaggtcaccccagttatcggaggagcaaacaggggctaagtccaccgggggaggctgctggtgaatattaaccaaggtcaccccagttatcggaggagcaaacaggggctaagtccaccgggggaggctgctggtgaatattaaccaaggtcaccccagttatcggaggagcaaacaggggctaagtccacggtacccactgggaggatgttgagtaagatggaaaactactgatgacccttgcagagacagagtattaggacatgtttgaacaggggccgggcgatcagcaggtagcactagaggatccccgtctgtctgcacatttcgtagagcgagtgttccgatactctaatctccctaggcaaggttcatatttgtgtaggttacttattctccttttgttgactaagtcaataatcagaatcagcaggtttggagtcagcttggcagggatcagcagcctgggttggaaggagggggtataaaagccccttcaccaggagaagccgtc

SEQ ID NO: 464 - DNA, 431 bp, Artificial Sequence
  Description of Artificial Sequence: Synthetic polynucleotide
aacaggttagtttgactagcgttaatcattaacgttaatcattaacgttaatcattaacgttaatcattaacgttaatcattaacatcgatgcgagaacttgtgcctccccgtgttcctgctctttgtccctctgtcctacttagactaatatttgccttgggtactgcaaacaggaaatgggggagggacaggagtagggcggagggtagttaagaatgtggatccccgtctgtctgcacatttcgtagagcgagtgttccgatactctaatctccctaggcaaggttcatatttgtgtaggttacttattctccttttgttgactaagtcaataatcagaatcagcaggtttggagtcagcttggcagggatcagcagcctgggttggaaggagggggtataaaagccccttcaccaggagaagccgtc

SEQ ID NO: 465 - DNA, 768 bp, Artificial Sequence
  Description of Artificial Sequence: Synthetic polynucleotide
aacaggttagtttgactagcgttaatcattaacgttaatcattaacgttaatcattaacgttaatcattaacgttaatcattaacatcgatgcgagaacttgtgcctccccgtgttcctgctctttgtccctctgtcctacttagactaatatttgccttgggtactgcaaacaggaaatgggggagggacaggagtagggcggagggtagttaagaatgtcaattggggggaggctgctggtgaatattaaccaaggtcaccccagttatcggaggagcaaacaggggctaagtccaccgggggaggctgctggtgaatattaaccaaggtcaccccagttatcggaggagcaaacaggggctaagtccaccgggggaggctgctggtgaatattaaccaaggtcaccccagttatcggaggagcaaacaggggctaagtccacggtacccactgggaggatgttgagtaagatggaaaactactgatgacccttgcagagacagagtattaggacatgtttgaacaggggccgggcgatcagcaggtagcactagaggatccccgtctgtctgcacatttcgtagagcgagtgttccgatactctaatctccctaggcaaggttcatatttgtgtaggttacttattctccttttgttgactaagtcaataatcagaatcagcaggtttggagtcagcttggcagggatcagcagcctgggttggaaggagggggtataaaagccccttcaccaggagaagccgtc

SEQ ID NO: 466 - DNA, 540 bp, Artificial Sequence
  Description of Artificial Sequence: Synthetic polynucleotide
gttaatcattaacgcttgtactttggtacagttaatcattaacgcttgtactttggtacagttaatcattaacgcttgtactttggtacaatcgatgcgagaacttgtgcctccccgtgttcctgctctttgtccctctgtcctacttagactaatatttgccttgggtactgcaaacaggaaatgggggagggacaggagtagggcggagggtagcccggggattctgcagtgagagcagagggccagctaagtggtactctcccagagactgtctgactcacgccaccccctccaccttggacacaggacgctgtggtttctgagccaggtacaatgactcctttcggtaagtgcagtggaagctgtacactgcccaggcaaagcgtccgggcagcgtaggcgggcgactcagatcccagccagtggacttagcccctgtttgctcctccgataactggggtgaccttggttaatattcaccagcagcctcccccgttgcccctctggatccactgcttaaatacggacgaggacagg

SEQ ID NO: 467 - DNA, 624 bp, Artificial Sequence
  Description of Artificial Sequence: Synthetic polynucleotide
agcaacagatcattctatgggttaatcattaacaacaggttaggcttgtactttggtacattggctcctagttaatcattaacttagcaatgtgcttgtactttggtacatagttacctagttaatcattaacaaacagtatggcttgtactttggtacaagcaacagatcattctatgggcgagaacttgtgcctccccgtgttcctgctctttgtccctctgtcctacttagactaatatttgccttgggtactgcaaacaggaaatgggggagggacaggagtagggcggagggtagcaattggattctgcagtgagagcagagggccagctaagtggtactctcccagagactgtctgactcacgccaccccctccaccttggacacaggacgctgtggtttctgagccaggtacaatgactcctttcggtaagtgcagtggaagctgtacactgcccaggcaaagcgtccgggcagcgtaggcgggcgactcagatcccagccagtggacttagcccctgtttgctcctccgataactggggtgaccttggttaatattcaccagcagcctcccccgttgcccctctggatccactgcttaaatacggacgaggacagg

SEQ ID NO: 468 - DNA, 951 bp, Artificial Sequence
  Description of Artificial Sequence: Synthetic polynucleotide
aggctcagaggcacacaggagtttctgggctcaccctgcccccttccaacccctcagttcccatcctccagcagctgtttgtgtgctgcctctgaagtccacactgaacaaacttcagcctactcatgtccctaaaatgggcaaacattgcaagcagcaaacagcaaacacacagccctccctgcctgctgaccttggagctggggcagaggtcagagacctctctgggcccatgccacctccaacatccactcgaccccttggaatttcggtggagaggagcagaggttgtcctggcgtggtttaggtagtgtgagagggcttaagagcaacagatcattctatgggttaatcattaacaacaggttaggcttgtactttggtacattggctcctagttaatcattaacttagcaatgtgcttgtactttggtacatagttacctagttaatcattaacaaacagtatggcttgtactttggtacaagcaacagatcattctatgggcgagaacttgtgcctccccgtgttcctgctctttgtccctctgtcctacttagactaatatttgccttgggtactgcaaacaggaaatgggggagggacaggagtagggcggagggtagcaattggattctgcagtgagagcagagggccagctaagtggtactctcccagagactgtctgactcacgccaccccctccaccttggacacaggacgctgtggtttctgagccaggtacaatgactcctttcggtaagtgcagtggaagctgtacactgcccaggcaaagcgtccgggcagcgtaggcgggcgactcagatcccagccagtggacttagcccctgtttgctcctccgataactggggtgaccttggttaatattcaccagcagcctcccccgttgcccctctggatccactgcttaaatacggacgaggacagg

SEQ ID NO: 469 - DNA, 535 bp, Artificial Sequence
  Description of Artificial Sequence: Synthetic polynucleotide
aacaggttagtttgactagcgttaatcattaacgttaatcattaacgttaatcattaacgttaatcattaacgttaatcattaacatcgatgcgagaacttgtgcctccccgtgttcctgctctttgtccctctgtcctacttagactaatatttgccttgggtactgcaaacaggaaatgggggagggacaggagtagggcggagggtagcccggggattctgcagtgagagcagagggccagctaagtggtactctcccagagactgtctgactcacgccaccccctccaccttggacacaggacgctgtggtttctgagccaggtacaatgactcctttcggtaagtgcagtggaagctgtacactgcccaggcaaagcgtccgggcagcgtaggcgggcgactcagatcccagccagtggacttagcccctgtttgctcctccgataactggggtgaccttggttaatattcaccagcagcctcccccgttgcccctctggatccactgcttaaatacggacgaggacagg

SEQ ID NO: 470 - DNA, 579 bp, Artificial Sequence
  Description of Artificial Sequence: Synthetic polynucleotide
agcaacagatcattctatgggttaatcattaacaacaggttaggttaatcattaacttggctcctagttaatcattaacaaacagtatggttaatcattaacaaattctggggttaatcattaactagttacctagcgagaacttgtgcctccccgtgttcctgctctttgtccctctgtcctacttagactaatatttgccttgggtactgcaaacaggaaatgggggagggacaggagtagggcggagggtagcaattggattctgcagtgagagcagagggccagctaagtggtactctcccagagactgtctgactcacgccaccccctccaccttggacacaggacgctgtggtttctgagccaggtacaatgactcctttcggtaagtgcagtggaagctgtacactgcccaggcaaagcgtccgggcagcgtaggcgggcgactcagatcccagccagtggacttagcccctgtttgctcctccgataactggggtgaccttggttaatattcaccagcagcctcccccgttgcccctctggatccactgcttaaatacggacgaggacagg

SEQ ID NO: 471 - DNA, 906 bp, Artificial Sequence
  Description of Artificial Sequence: Synthetic polynucleotide
aggctcagaggcacacaggagtttctgggctcaccctgcccccttccaacccctcagttcccatcctccagcagctgtttgtgtgctgcctctgaagtccacactgaacaaacttcagcctactcatgtccctaaaatgggcaaacattgcaagcagcaaacagcaaacacacagccctccctgcctgctgaccttggagctggggcagaggtcagagacctctctgggcccatgccacctccaacatccactcgaccccttggaatttcggtggagaggagcagaggttgtcctggcgtggtttaggtagtgtgagagggcttaagagcaacagatcattctatgggttaatcattaacaacaggttaggttaatcattaacttggctcctagttaatcattaacaaacagtatggttaatcattaacaaattctggggttaatcattaactagttacctagcgagaacttgtgcctccccgtgttcctgctctttgtccctctgtcctacttagactaatatttgccttgggtactgcaaacaggaaatgggggagggacaggagtagggcggagggtagcaattggattctgcagtgagagcagagggccagctaagtggtactctcccagagactgtctgactcacgccaccccctccaccttggacacaggacgctgtggtttctgagccaggtacaatgactcctttcggtaagtgcagtggaagctgtacactgcccaggcaaagcgtccgggcagcgtaggcgggcgactcagatcccagccagtggacttagcccctgtttgctcctccgataactggggtgaccttggttaatattcaccagcagcctcccccgttgcccctctggatccactgcttaaatacggacgaggacagg

SEQ ID NO: 472 - DNA, 286 bp, Artificial Sequence
  Description of Artificial Sequence: Synthetic polynucleotide
gggggaggctgctggtgaatattaaccaaggtcaccccagttatcggaggagcaaacaggggctaagtccacacgcgtggtaccgtctgtctgcacatttcgtagagcgagtgttccgatactctaatctccctaggcaaggttcatatttgtgtaggttacttattctccttttgttgactaagtcaataatcagaatcagcaggtttggagtcagcttggcagggatcagcagcctgggttggaaggagggggtataaaagccccttcaccaggagaagccgtc

SEQ ID NO: 473 - DNA, 541 bp, Artificial Sequence
  Description of Artificial Sequence: Synthetic polynucleotide
gggggaggctgctggtgaatattaaccaaggtcaccccagttatcggaggagcaaacaggggctaagtccaccgggggaggctgctggtgaatattaaccaaggtcaccccagttatcggaggagcaaacaggggctaagtccaccgggggaggctgctggtgaatattaaccaaggtcaccccagttatcggaggagcaaacaggggctaagtccacggtacccactgggaggatgttgagtaagatggaaaactactgatgacccttgcagagacagagtattaggacatgtttgaacaggggccgggcgatcagcaggtagctctagaggatccccgtctgtctgcacatttcgtagagcgagtgttccgatactctaatctccctaggcaaggttcatatttgtgtaggttacttattctccttttgttgactaagtcaataatcagaatcagcaggtttggagtcagcttggcagggatcagcagcctgggttggaaggagggggtataaaagccccttcaccaggagaagccgtc

SEQ ID NO: 474 - DNA, 452 bp, Artificial Sequence
  Description of Artificial Sequence: Synthetic polynucleotide
cggtacgcgggggaggctgctggtgaatattaaccaaggtcaccccagttatcggaggagcaaacaggggctaagtccaccgggggaggctgctggtgaatattaaccaaggtcaccccagttatcggaggagcaaacaggggctaagtccaccgggggaggctgctggtgaatattaaccaaggtcaccccagttatcggaggagcaaacaggggctaagtccactgtacaacgcgtgaattcgctagcgtctgtctgcacatttcgtagagcgagtgttccgatactctaatctccctaggcaaggttcatatttgtgtaggttacttattctccttttgttgactaagtcaataatcagaatcagcaggtttggagtcagcttggcagggatcagcagcctgggttggaaggagggggtataaaagccccttcaccaggagaagccgtc

SEQ ID NO: 475 - DNA, 1125 bp, Artificial Sequence
  Description of Artificial Sequence: Synthetic polynucleotide
aggctcagaggcacacaggagtttctgggctcaccctgcccccttccaacccctcagttcccatcctccagcagctgtttgtgtgctgcctctgaagtccacactgaacaaacttcagcctactcatgtccctaaaatgggcaaacattgcaagcagcaaacagcaaacacacagccctccctgcctgctgaccttggagctggggcagaggtcagagacctctctgggcccatgccacctccaacatccactcgaccccttggaatttcggtggagaggagcagaggttgtcctggcgtggtttaggtagtgtgagagggtccgggttcaaaaccacttgctgggtggggagtcgtcagtaagtggctatgccccgaccccgaagcctgtttccccatctgtacaatggaaatgataaagacgcccatctgatagggtttttgtggcaaataaacatttggtttttttgttttgttttgttttgttttttgagatggaggtttgctctgtcgcccaggctggagtgcagtgacacaatctcatctcaccacaaccttcccctgcctcagcctcccaagtagctgggattacaagcatgtgccaccacacctggctaattttctatttttagtagagacgggtttctccatgttggtcagcctcagcctcccaagtaactgggattacaggcctgtgccaccacacccggctaattttttctatttttgacagggacggggtttcaccatgttggtcaggctggtctagaggtactggatcttgctaccagtggaacagccactaaggattctgcagtgagagcagagggccagctaagtggtactctcccagagactgtctgactcacgccaccccctccaccttggacacaggacgctgtggtttctgagccaggtacaatgactcctttcggtaagtgcagtggaagctgtacactgcccaggcaaagcgtccgggcagcgtaggcgggcgactcagatcccagccagtggacttagcccctgtttgctcctccgataactggggtgaccttggttaatattcaccagcagcctcccccgttgcccctctggatccactgcttaaatacggacgaggacagg

SEQ ID NO: 476-477 - skipped (2 entries)

SEQ ID NO: 478 - DNA, 541 bp, Artificial Sequence
  Description of Artificial Sequence: Synthetic polynucleotide
gggggaggctgctggtgaatattaaccaaggtcaccccagttatcggaggagcaaacaggggctaagtccaccgggggaggctgctggtgaatattaaccaaggtcaccccagttatcggaggagcaaacaggggctaagtccaccgggggaggctgctggtgaatattaaccaaggtcaccccagttatcggaggagcaaacaggggctaagtccacggtacccactgggaggatgttgagtaagatggaaaactactgatgacccttgcagagacagagtattaggacatgtttgaacaggggccgggcgatcagcaggtagcactagaggatccccgtctgtctgcacatttcgtagagcgagtgttccgatactctaatctccctaggcaaggttcatatttgtgtaggttacttattctccttttgttgactaagtcaataatcagaatcagcaggtttggagtcagcttggcagggatcagcagcctgggttggaaggagggggtataaaagccccttcaccaggagaagccgtc

SEQ ID NO: 479 - DNA, 1125 bp, Artificial Sequence
  Description of Artificial Sequence: Synthetic polynucleotide
aggctcagaggcacacaggagtttctgggctcaccctgcccccttccaacccctcagttcccatcctccagcagctgtttgtgtgctgcctctgaagtccacactgaacaaacttcagcctactcatgtccctaaaatgggcaaacattgcaagcagcaaacagcaaacacacagccctccctgcctgctgaccttggagctggggcagaggtcagagacctctctgggcccatgccacctccaacatccacttgaccccttggaatttcagtggagaggagcagaggttgtcctggtgtggtttaggtagtgtgagagggtccaggttcaaaaccacttgctgggtggggagttgtcagtaagtggctatgccccaaccctgaagcctgtttccccatctgtacaatggaaatgataaagacccccatctgatagggtttttgtggcaaataaacatttggtttttttgttttgttttgttttgttttttgagatggaggtttgctctgtggcccaggctggagtgcagtgacacaatctcatctcaccacaaccttcccctgcctcagcctcccaagtagctgggattacaagcatgtgccaccacacctggctaattttctatttttagtagagatgggtttctccatgttggtcagcctcagcctcccaagtaactgggattacaggcctgtgccaccacacctggctaattttttctatttttgacagggatggggtttcaccatgttggtcaggctggtctagaggtactggatcttgctaccagtggaacagccactaaggattctgcagtgagagcagagggccagctaagtggtactctcccagagactgtctgactcatgccaccccctccaccttggacacaggacactgtggtttctgagccaggtacaatgactccttttggtaagtgcagtggaagctgtacactgcccaggcaaagtgtctgggcagcataggcaggtgactcagatcccagccagtggacttagcccctgtttgctcctctgataactggggtgaccttggttaatattcaccagcagcctcccctgttgcccctctggatccactgcttaaatacagacaaggacagg

SEQ ID NO: 480 - DNA, 3990 bp, Artificial Sequence
  Description of Artificial Sequence: Synthetic polynucleotide
gtccaagccactctaaagggcaatctggcagcactttgtgaaattaagagtgcatgttccctatgattcataatagcaccactcttctatcccagaaaatttctaccccaggcctataagggaagaaagataaggaaatttatcacagtattgtttggggtggtgaaaaattagcaatgacttagatgtccataactggaaaataaagaagtcaagtgtggcaaatacacactgggatattctgaaccatttagaaaagcaaagaactagatacatattcagcagcatggctggatcctaagaacacagttgaaagaaaaaagaaactatgaaatctatagtacatccatagattgtagtaaatctatagtgccacatcacatatccatgaaaaatacatatacgcacaaacatttctatgtattttacaagttcaaggctaaacatcatattagagaagttgcctctggggaaaggcagtgagagtgaggaattatgataaaagagaatgaataaaaaaacaagagaagggtcatgtaggttttgtttctgtgccatgaactcatggattatgattaactcaaccttctgcacatgaagataaacaagaaagaactgataaacctgcaatggttgggtaatcttcaacttccaaatcagcaaaggtcagctctaagtttgccaagtacacaacttctcatcttgtgacatgttccccacctctgtgcagtgttaaaaaatacctcagtggtctactgactgactgtggatgcttcttctagatgtgcctttttttcctccatttccttagcacccagcactgctctcattatagcagcacattgcattccaaccaaattgaacaaaaaggtggcttaaaaatcatctgcaagtttatggcacaagcaatctcttatttttatcttagtgcataaataaatttttcctttttgccagaataattttttttaaagaagcgattagtttttcttctctcagatagcaatgatgtgctttcctctcaacctagatttagggcatttttatgtgagataggattaaaaattccatttttgtacaaccactatggagaacagtttggcagttccccaaaaaactaaaaatagagctactatatgatctagtgatcccactgctgggtatatacctataagaaaggaaatcagtatatcaaagagatgtctgttcttttatgtttgttgcagcactgttcacaatagccaagatctggaagcaacccaagtctccatcaacatgggttttaaaaaaatgtggtactttaatacacaatggagtactattcagcaataaaaaagaatgagatcctgttatttgcaataacatggacagaactggaggtcattatgtcaaatgaaataagccaggcacagaaagccaaacatcacatattctcactcatatgtggggtctaaaaatcaaaacaatctgattcatggagctagagagtagagagctaattaccagaggtggggaagggtagtaggggcctggaggggaggtggagatggttaataggtacaaaaaaatatagaaagaatgaataagacctagtatttgatagtacaacagggcgaatatagtcaaaataatttaattatacatttaaaaatacctgaaagagtataattggcttgtttgcaacacaaaagataaatgcttgaggggatggatgccccattttcaatgatgtgattattacacattgcatgcctgtatcaaaatattgcacatactccatgaatgcatacatctactatgttcccacaaaaattaaacattagaaaaaagagttgcattttcagctgttatggggagaagaaagaaaagctatcattttgttgtcctaaaaattatgttgtcctcatttcaaacaggaaagcaaaagtatttgagagccagtgcagtgccttggtgttgggtgaaacatagattgaatttgggccatttgtttaaacttcctaggcctcagtttcttgcctattaaaagggagtgcatagttcatgggattgttaagaggaagaagtgaaaccatgcacgtggagagcgtggcacagtgtctaagacagagtgtgcatgcaaataagtagataatattctttgcttttctttattgcatgcctgtaatatttttggagttgtcacattcattgccctcaagtagcatcaagggatgaaattatgtttgtaagaaaatcctgaggctgaggaatacaacatgttttatgtctactacactgaaaaatgccggagtcagataaagaatacagattctcctgaggatggaaatcaagatcttcgccttcaatatttaacaacattgagcttccaacttactatgggaaatattcatcaggcccctaaaggttccttttggacagaaattgcacttgttatatctgtattcttagcagacagtagacagcctggcacatcataaaggcttaaggaatcctaaatatcccttaaaattctcattttaaagacaaaaacaaaacaaaaaaaaaaaacaaaaaaaaactgaggcatgggcttgaccaaatcagtggtagaaccaagagttaaaccacttgttttgaatcctaaacctgagttttattttacttatttatttatttatttgtttatttattttcagatgcttggtcaaagaacagtgggaggagagggatgggcttccagcaacctttattattggcttattttcttacagcccattactttctcttgggaaaatattaagcaggcactcaaggcttgaggcccctgagttttcacatcctttctgaacctctgaacctgctttccagcattcttttatactttgttttacctcctggtcagtaatgcctcaccctcagtcttctctaaaagtgtggttaatggcatcttcctgactatttgaagaccactggccaaatcccaccagctcactcatagaccatccccctactttactttcttcaaaagacttagccctacctaaacttatttatatgtttattttctgcccaccagaatggcagcatagctggggaggcagagtctgttttgttcattgctgtattcccaaagactagaacaccaccaagcacacggtacaggtctcagtaattattgtcaaatttatgtggatttgcttttaaacaatatcttccatttactgagtgtttatgtggaagaactgtactaaattttaatgcatttctttattcctattcttaaaaccttccagcaaggtggctctaccaccctcttttccgagcttcaggagcagttgtgcgaatagctggagaacaccaggctggatttaaacccagatcgctcttacatttgctctttacctgctgtgctcagcgttcacgtgccctctagctgtagttttctgaagtcagcgcacagcaaggcagtgtgcttagaggttaacagaagggaaaacaacaacaacaaaaatctaaatgagaatcctgactgtttcagctgggggtaaggggggcggattattcatataattgttataccagacggtcgcaggcttagtccaattgcagagaactcgcttcccaggcttctgagagtcccggaagtgcctaaacctgtctaatcgacggggcttgggtggcccgtcgctccctggcttcttccctttacccagggcgggcagcgaagtggtgcctcctgcgtcccccacaccctccctcagcccctcccctccggcccgtcctgggcaggtgacctggagcatccggcaggctgccctggcctcctgcgtcaggacaacgcccacgaggggcgttactgtgcggagatgcaccacgcaagagacaccctttgtaactctcttctcctccctagtgcgaggttaaaaccttcagccccacgtgctgtttgcaaacctgcctgtacctgaggccctaaaaagccagagacctcactcccggggagccagc

SEQ ID NO: 481 - DNA, 3983 bp, Artificial Sequence
  Description of Artificial Sequence: Synthetic polynucleotide
gtccaagccactctaaagggcaatctggcagcactttgtgaaattaagagtgcatgttccctatgattcataatagcaccactcttctatcccagaaaatttctaccccaggcctataagggaagaaagataaggaaatttatcacagtattgtttggggtggtgaaaaattagcaatgacttagatgtccataactggaaaataaagaagtcaagtgtggcaaatacacactgggatattctgaaccatttagaaaagcaaagaactagatacatattcagcagcatggctggatcctaagaacacagttgaaagaaaaaagaaactatgaaatctatagtacatccatagattgtagtaaatctatagtgccacatcacatatccatgaaaaatacatatacgcacaaacatttctatgtattttacaagttcaaggctaaacatcatattagagaagttgcctctggggaaaggcagtgagagtgaggaattatgataaaagagaatgaataaaaaaacaagagaagggtcatgtaggttttgtttctgtgccatgaactcatggattatgattaactcaaccttctgcacatgaagataaacaagaaagaactgataaacctgcaatggttgggtaatcttcaacttccaaatcagcaaaggtcagctctaagtttgccaagtacacaacttctcatcttgtgacatgttccccacctctgtgcagtgttaaaaaatacctcagtggtctactgactgactgtggatgcttcttctagatgtgcctttttttcctccatttccttagcacccagcactgctctcattatagcagcacattgcattccaaccaaattgaacaaaaaggtggcttaaaaatcatctgcaagtttatggcacaagcaatctcttatttttatcttagtgcataaataaatttttcctttttgccagaataattttttttaaagaagcgattagtttttcttctctcagatagcaatgatgtgctttcctctcaacctagatttagggcatttttatgtgagataggattaaaaattccatttttgtacaaccactatggagaacagtttggcagttccccaaaaaactaaaaatagagctactatatgatctagtgatcccactgctgggtatatacctataagaaaggaaatcagtatatcaaagagatgtctgttcttttatgtttgttgcagcactgttcacaatagccaagatctggaagcaacccaagtctccatcaacatgggttttaaaaaaatgtggtactttaatacacaatggagtactattcagcaataaaaaagaatgagatcctgttatttgcaataacatggacagaactggaggtcattatgtcaaatgaaataagccaggcacagaaagccaaacatcacatattctcactcatatgtggggtctaaaaatcaaaacaatctgattcatggagctagagagtagagagctaattaccagaggtggggaagggtagtaggggcctggaggggaggtggagatggttaataggtacaaaaaaatatagaaagaatgaataagacctagtatttgatagtacaacagggcgaatatagtcaaaataatttaattatacatttaaaaatacctgaaagagtataattggcttgtttgcaacacaaaagataaatgcttgaggggatggatgccccattttcaatgatgtgattattacacattgcatgcctgtatcaaaatattgcacatactccatgaatgcatacatctactatgttcccacaaaaattaaacattagaaaaaagagttgcattttcagctgttatggggagaagaaagaaaagctatcattttgttgtcctaaaaattatgttgtcctcatttcaaacaggaaagcaaaagtatttgagagccagtgcagtgccttggtgttgggtgaaacatagattgaatttgggccatttgtttaaacttcctaggcctcagtttcttgcctattaaaagggagtgcatagttcatgggattgttaagaggaagaagtgaaaccatgcacgtggagagcgtggcacagtgtctaagacagagtgtgcatgcaaataagtagataatattctttgcttttctttattgcatgcctgtaatatttttggagttgtcacattcattgccctcaagtagcatcaagggatgaaattatgtttgtaagaaaatcctgaggctgaggaatacaacatgttttatgtctactacactgaaaaatgccggagtcagataaagaatacagattctcctgaggatggaaatcaagatcttcgccttcaatatttaacaacattgagcttccaacttactatgggaaatattcatcaggcccctaaaggttccttttggacagaaattgcacttgttatatctgtattcttagcagacagtagacagcctggcacatcataaaggcttaaggaatcctaaatatcccttaaaattctcattttaaagacaaaaacaaaacaaaaaaaaaaaacaaaaaaaaactgaggcatgggcttgaccaaatcagtggtagaaccaagagttaaaccacttgttttgaatcctaaacctgagttttattttacttatttatttatttatttgtttatttattttcagatgcttggtcaaagaacagtgggaggagagggatgggcttccagcaacctttattattggcttattttcttacagcccattactttctcttgggaaaatattaagcaggcactcaaggcttgaggcccctgagttttcacatcctttctgaacctctgaacctgctttccagcattcttttatactttgttttacctcctggtcagtaatgcctcaccctcagtcttctctaaaagtgtggttaatggcatcttcctgactatttgaagaccactggccaaatcccaccagctcactcatagaccatccccctactttactttcttcaaaagacttagccctacctaaacttatttatatgtttattttctgcccaccagaatggcagcatagctggggaggcagagtctgttttgttcattgctgtattcccaaagactagaacaccaccaagcacacggtacaggtctcagtaattattgtcaaatttatgtggatttgcttttaaacaatatcttccatttactgagtgtttatgtggaagaactgtactaaattttaatgcatttctttattcctattcttaaaaccttccagcaaggtggctctaccaccctcttttccgagcttcaggagcagttgtgcgaatagctggagaacaccaggctggatttaaacccagatcgctcttacatttgctctttacctgctgtgctcagcgttcacgtgccctctagctgtagttttctgaagtcagcgcacagcaaggcagtgtgcttagaggttaacagaagggaaaacaacaacaacaaaaatctaaatgagaatcctgactgtttcagctgggggtaaggggggcggattattcatataattgttataccagacggtcgcaggcttagtccaattgcagagaactcgcttcccaggcttctgagagtcccggaagtgcctaaacctgtctaatcgacggggcttgggtggcccgtcgctccctggcttcttccctttacccagggcgggcagcgaagtggtgcctcctgcgtcccccacaccctccctcagcccctcccctccggcccgtcctgggcaggtgacctggagcatccggcaggctgccctggcctcctgcgtcaggacaacgcccacgaggggcgttactgtgcggagatgcaccacgcaagagacaccctttgtaactctcttctcctccctagtgcgaggttaaaaccttcagccccacgtgctgtttgcaaacctgcctgtacctgaggccctaaaaagccagagacctcactcccgggg

SEQ ID NO: 482 - DNA, 129 bp, Artificial Sequence
  Description of Artificial Sequence: Synthetic polynucleotide
acacagatccacaagctcctgaagaggtaagggtttaagggatggttggttggtggggtattaatgtttaattacctggagcacctgcctgaaatcactttttttcaggttggtttaaacgccgccacc

SEQ ID NO: 483 - DNA, 130 bp, Artificial Sequence
  Description of Artificial Sequence: Synthetic polynucleotide
acacagatccacaagctcctgaagaggtaagggtttaagggatggttggttggtggggtattaatgtttaattacctggagcacctgcctgaaatcactttttttcaggttgggtttaaacgccgccacc

SEQ ID NO: 484 - DNA, 129 bp, Artificial Sequence
  Description of Artificial Sequence: Synthetic polynucleotide
acacagatccacaagctcctgaagaggtaagggtttaagggatggttggttggtggggtattaatgtttaattacctggagcacctgcctgaaatcactttttttcaggttgggttaaacgccgccacc

SEQ ID NO: 485 - DNA, 49 bp, Artificial Sequence
  Description of Artificial Sequence: Synthetic oligonucleotide
gccctgtctcctcagcttcaggcaccaccactgacctgggacagtgaat

SEQ ID NO: 486 - DNA, 47 bp, Artificial Sequence
  Description of Artificial Sequence: Synthetic oligonucleotide
acacagatccacaagctcctgaagaggttggtttaaacgccgccacc

SEQ ID NO: 487 - DNA, 50 bp, Artificial Sequence
  Description of Artificial Sequence: Synthetic oligonucleotide
catttcgtgggctaagtttaagctactctcgctccgggataagagtttca

SEQ ID NO: 488 - skipped

SEQ ID NO: 489 - DNA, 25 bp, Artificial Sequence
  Description of Artificial Sequence: Synthetic oligonucleotide
gggacatcgtagagagtcgtactta

SEQ ID NO: 490 - DNA, 162 bp, Artificial Sequence
  Description of Artificial Sequence: Synthetic polynucleotide
gccctgtctcctcagcttcaggcaccaccactgacctgggacagtgaataattactctaaggtaaatataaaatttttaagtgtataatgtgttaaactactgattctaattgtttctctcttttagattccaacctttggaactgagtttaaacagccacc

SEQ ID NO: 491 - DNA, 165 bp, Artificial Sequence
  Description of Artificial Sequence: Synthetic polynucleotide
gccctgtctcctcagcttcaggcaccaccactgacctgggacagtgaataattactctaaggtaaatataaaatttttaagtgtataatgtgttaaactactgattctaattgtttctctcttttagattccaacctttggaactgagtttaaaccgcagccacc

SEQ ID NO: 492 - DNA, 164 bp, Artificial Sequence
  Description of Artificial Sequence: Synthetic polynucleotide
gccctgtctcctcagcttcaggcaccaccactgacctgggacagtgaataattactctaaggtaaatataaaatttttaagtgtataatgtgttaaactactgattctaattgtttctctcttttagattccaacctttggaactgagtttaaacgccgccacc

SEQ ID NO: 493 - DNA, 230 bp, Artificial Sequence
  Description of Artificial Sequence: Synthetic polynucleotide
gccctgtctcctcagcttcaggcaccaccactgacctgggacagtgaataattactctaaggtaaatataaaatttttaagtgtataatgtgttaaactactgattctaattgtttctctcttttagattccaacctttggaactgagtttaaacgggacatcgtagagagtcgtacttacatttcgtgggctaagtttaagctactctcgctccgggataagagtttca

SEQ ID NO: 494 - DNA, 150 bp, Artificial Sequence
  Description of Artificial Sequence: Synthetic polynucleotide
gccctgtctcctcagcttcaggcaccaccactgacctgggacagtgaataattactctaaggtaaatataaaatttttaagtgtataatgtgttaaactactgattctaattgtttctctcttttagattccaacctttggaactgaacc

SEQ ID NO: 495 - DNA, 135 bp, Artificial Sequence
  Description of Artificial Sequence: Synthetic polynucleotide
acacagatccacaagctcctgtctagaaagaggtaagggtttaagggatggttggttggtggggtattaatgtttaattacctggagcacctgcctgaaatcactttttttcaggttggtttaaacgccgccacc

SEQ ID NO: 496 - DNA, 136 bp, Artificial Sequence
  Description of Artificial Sequence: Synthetic polynucleotide
acacagatccacaagctcctgtctagaaagaggtaagggtttaagggatggttggttggtggggtattaatgtttaattacctggagcacctgcctgaaatcactttttttcaggttgggtttaaacgccgccacc

SEQ ID NO: 497 - DNA, 135 bp, Artificial Sequence
  Description of Artificial Sequence: Synthetic polynucleotide
acacagatccacaagctcctgtctagaaagaggtaagggtttaagggatggttggttggtggggtattaatgtttaattacctggagcacctgcctgaaatcactttttttcaggttgggttaaacgccgccacc

SEQ ID NO: 498 - DNA, 21 bp, Artificial Sequence
  Description of Artificial Sequence: Synthetic oligonucleotide
acacagatccacaagctcctg

SEQ ID NO: 499 - DNA, 67 bp, Artificial Sequence
  Description of Artificial Sequence: Synthetic oligonucleotide
gccctgtctcctcagcttcaggcaccaccactgacctgggacagtgaatgtttaaaccgcagccacc

SEQ ID NO: 500 - DNA, 131 bp, Artificial Sequence
  Description of Artificial Sequence: Synthetic polynucleotide
acacagatccacaagctcctgaagaggtaagggtttaagggatggttggttggtggggtattaatgtttaattacctggagcacctgcctgaaatcactttttttcaggttgggtttaaaccgcagccacc

SEQ ID NO: 501 - DNA, 195 bp, Artificial Sequence
  Description of Artificial Sequence: Synthetic polynucleotide
acacagatccacaagctcctgaagaggtaagggtttaagggatggttggttggtggggtattaatgtttaattacctggagcacctgcctgaaatcactttttttcaggttggtttaaacgggacatcgtagagagtcgtacttacatttcgtgggctaagtttaagctactctcgctccgggataagagtttca

SEQ ID NO: 502 - DNA, 130 bp, Artificial Sequence
  Description of Artificial Sequence: Synthetic polynucleotide
acacagatccacaagctcctgaagaggtaagggtttaagggatggttggttggtggggtattaatgtttaattacctggagcacctgcctgaaatcactttttttcaggttgggttaaaccgcagccacc

SEQ ID NO: 503 - DNA, 130 bp, Artificial Sequence
  Description of Artificial Sequence: Synthetic polynucleotide
acacagatccacaagctcctgaagaggtaagggtttaagggatggttggttggtggggtattaatgtttaattacctggagcacctgcctgaaatcactttttttcaggttggtttaaaccgcagccacc

SEQ ID NO: 504 - DNA, 48 bp, Artificial Sequence
  Description of Artificial Sequence: Synthetic oligonucleotide
acacagatccacaagctcctgaagaggttggtttaaaccgcagccacc

SEQ ID NO: 505 - DNA, 137 bp, Artificial Sequence
  Description of Artificial Sequence: Synthetic polynucleotide
acacagatccacaagctcctgtctagaaagaggtaagggtttaagggatggttggttggtggggtattaatgtttaattacctggagcacctgcctgaaatcactttttttcaggttgggtttaaaccgcagccacc

SEQ ID NO: 506 - DNA, 136 bp, Artificial Sequence
  Description of Artificial Sequence: Synthetic polynucleotide
acacagatccacaagctcctgtctagaaagaggtaagggtttaagggatggttggttggtggggtattaatgtttaattacctggagcacctgcctgaaatcactttttttcaggttgggttaaaccgcagccacc

SEQ ID NO: 507 - DNA, 136 bp, Artificial Sequence
  Description of Artificial Sequence: Synthetic polynucleotide
acacagatccacaagctcctgtctagaaagaggtaagggtttaagggatggttggttggtggggtattaatgtttaattacctggagcacctgcctgaaatcactttttttcaggttggtttaaaccgcagccacc

SEQ ID NO: 508 - DNA, 66 bp, Artificial Sequence
  Description of Artificial Sequence: Synthetic oligonucleotide
gccctgtctcctcagcttcaggcaccaccactgacctgggacagtgaatgtttaaacgccgccacc

SEQ ID NO: 509 - DNA, 867 bp, Artificial Sequence
  Description of Artificial Sequence: Synthetic polynucleotide
gtgagccagggcagcctgagctgctcagttaggggaatttgggcctccagagaaagagatcccaagactgctggtgcttcctggtttcataagctcagtaagaagtctgaattggttggaagctgatgagaatatccaggaagtcaacagacaaatgtcctcaacaattgtttctaagtaggagaacatctgtcctgggtggctttcacaggaatgaatgaccattgctttagggggttggggatctggcctccagaactgccaccaattagctgtgtgtctttggacaagttactgtccctctctgttgtctgtttactcttctgtacactgaaggggttccaatccaggtcttaggattcaaaagcctgtgcatgttccatttttagtactttccacactgtatttctcaatgtctttctgggacattttataaatcatattatatcacctctaaggatctttcagtttgttatatatgtgtctattaagttagattgtgagctcctaaaagataaagcattgtcttattcatctttaaatttctcagagcccaaatagtgcctggaacctagtagttgctcaataaaaggtattgaatttacaggattgaatggtgacatcaatgaataattgaagattccttaagctgataactgacccagtagcatcattgatcatttaattgccctggacttacttattttccaccacactacatatttctgtatagaatatatatagctcattgtattgcaagatttaactagaagaaagagttcatgcttgctttgtccatgtaggtttaacaggaatgaattgctaaactgtggaaaatgttttaaacaaatgcatcttatcctgtag

SEQ ID NO: 510 - DNA, 867 bp, Artificial Sequence
  Description of Artificial Sequence: Synthetic polynucleotide
gtgagccacggcagcctgagctgctcagttaggggaatttgggcctccagagaaagagatccgaagactgctggtgcttcctggtttcataagctcagtaagaagtctgaattcgttggaagctgatgagaatatccaggaagtcaacagacaaatgtcctcaacaattgtttctaagtaggagaacatctgtcctcggtggctttcacaggaatgaatgaccattgctttagggggttggggatctggcctccagaactgccaccaattagctgtgtgtctttggacaagttactgtccctctctgttgtctgtttactcttctgtacactgaaggggttccaatccaggtcttacgattcaaaagcctgtgcatgttccatttttagtactttccacactgtatttctcaatgtctttctgggacattttataaatcatattatatcacctctaaggatctttcagtttgttatatatgtgtctattaagttagattgtgagctcctaaaagataaagcattgtcttattcatctttaaatttctcagagcccaaatagtgcctggaacctagtagttgctcaataaaaggtattgaatttacaggattgaatggtgacatcaatgaataattgaagattccttaagctgataactgacccagtagcatcattgatcatttaattgccctggacttacttattttccaccacactacatatttctgtatagaatatatatagctcattgtattgcaagatttaactagaagaaagagttcatgcttgctttgtccatggaggtttaacaggaatgaattgctaaactgtggaaaatgttttaaacaaatgcatcttatcctgtag

SEQ ID NO: 511 - DNA, 229 bp, Artificial Sequence
  Description of Artificial Sequence: Synthetic polynucleotide
gtgagccagggcagcctgagctgctcagttaggggaatttgggcctccagagaaagagatcccaagactgctggtgcttcctggtttcataagctcagtaagaagtctgaattggttggaagctgatgatagaagaaagagttcatgcttgctttgtccatggaggtttaacaggaatgaattgctaaactgtggaaaatgttttaaacaaatgcatcttatcctgtag

SEQ ID NO: 512 - DNA, 2000 bp, Artificial Sequence
  Description of Artificial Sequence: Synthetic polynucleotide
gtgagccagggcagcctgagctgctcagttaggggaatttgggcctccagagaaagagatcccaagactgctggtgcttcctggtttcataagctcagtaagaagtctgaattggttggaagctgatgagaatatccaggaagtcaacagacaaatgtcctcaacaattgtttctaagtaggagaacatctgtcctgggtggctttcacaggaatgaatgaccattgctttagggggttggggatctggcctccagaactgccaccaattagctgtgtgtctttggacaagttactgtccctctctgttgtctgtttactcttctgtacactgaaggggctggtccctaatgatctgggatgggatgtggaatccttctagatttcttttgtaatatttataaagtgctctcagcaaggtatcaaaatggcaaaattgtgagtaactatcctcctttcattttgggaagaagatgaggcatgaagagaattcagacagaaacttactcagaccaggggaggcagaaactaagcagagaggaaaatgaccaagagttagccctgggcatggaatgtgaaagaaccctaaaggtgacttggaaataatgcccaaggtatattccattctcctggatttgttggcattttcttgaggtgaagaattgcagaatacattctttaatgtgacctacatatttacccatgtgaggaagtctgctcctggactcttgagattcagtcataaagcccaggccagggaaataatgtaagtctgcaggcccctgtcatcagtaggattagggagaagagttctcagtagaaaacagggaggctggagagaaaagaatggttaatgttaaggttaatataactagaaagactgcagaacttaggactgatttttatttgaatccttaaaaaaaaaaatttcttatgaaaatagtacatggctcttaggagacagaacttattgtacagaggaacagtgtgagagtcagagtgaattttatgtattatttttggacttaggctaatgatttagcaaactctggaatgtcagccctaaccccaaccttggttttctgtcacatgcatgtagtaagtgctagatcctggacattctttgagatttagtttaagactaagtttattttctgataggttatttgtgtactttcatggattttgtaactctttttcaacaattggatgtctcagatctcagcatatgggagcaagttaatgcttcctgagatctttgccaaaggtcaagaggtcatttttgtgtatttataattttccatcatttttatatacttctcaatattctttttaaactattcttttccttttttcatcctctgaatactgttttgacagatcttgttattagcatgctttcagggatgagaaaactaagaaagctgaatgatttgcccaaagtagtccacctggaaaatgaaagagagaggattccaatccaggtcttaggattcaaaagcctgtgcatgttccatttttagtactttccacactgtatttctcaatgtctttctgggacattttataaatcatattatatcacctctaaggatctttcagtttgttatatatgtgtctattaagttagattgtgagctcctaaaagataaagcattgtcttattcatctttaaatttctcagagcccaaatagtgcctggaacctagtagttgctcaataaaaggtattgaatttacaggattgaatggtgacatcaatgaataattgaagattccttaagctgataactgacccagtagcatcattgatcatttaattgccctggacttacttattttccaccacactacatatttctgtatagaatatatatagctcattgtattgcaagatttaactagaagaaagagttcatgcttgctttgtccatgtaggtttaacaggaatgaattgctaaactgtggaaaatgttttaaacaaatgcatcttatcctgtag

SEQ ID NO: 513 - DNA, 820 bp, Artificial Sequence
  Description of Artificial Sequence: Synthetic polynucleotide
gtaagcctgttgggcttccactgctaggagagaattggttccccacatgtgaaagcagtctgggaaatgctggtatttccagtctcctaaggctactaagaaatatgactttatttagaggcgaggaaaatgcccaggaagtcaactgatgagtctagtcttaacaagttgaggatacagaaagttggggatctgagctgctaccaacatctgtgtgtctttgggtggctcattggtatcctctgcctattggctttatcttctgtacactgaaaggaaatggctggtccttagtcacctacccaggtcttggatccatagcctacggatgtcccatttttattgctttttatattttgtctcccagtgtctttttgaggattttttttttttttttgcatcacttgctcttcctctaagaatctcctgacttcttgtacatgtgtctgatggtcagaattttagcactgaagtatgggcgtatttatcataattcaggtttatatcctttcagatatgggctagggtctggtattagggtgctcattaaaaaatgttgatttttgtcagtgtctagtgacatcaatgcataatttaaggttctataaattgaaagctaacccaggagtgactcatcctctcattgttttcaacttacttatttctgatcacactgacttccctgtggaatacacgtggttcactgtgttccaaagcttaacgagcagaaaaaggttatgctcgtctcttcttgagaggttttaagagaataattgctaagctgtgaaaaacattttaaccaagtgatctaattatgtag

SEQ ID NO: 514 - DNA, 820 bp, Artificial Sequence
  Description of Artificial Sequence: Synthetic polynucleotide
gtaagcctgttgggcttccactgctaggagagaattggttccccacatgtgaaagcagtctgggaaatgctggtatttccagtctcctaaggctactaagaaatatgactttatttagaggccaggaaaatgcccaggaagtcaactgatgagtctagtcttaacaagttgaggatacagaaagttggggatctgagctgctaccaacatctgtgtgtctttgggtggctcattggtatcctctgcctattggctttatcttctgtacactgaaaggaaatggctggtccttagtcacctacccaggtcttggatccatagcctagggatgtcccatttttattgctttttatattttgtctcccagtgtctttttgaggattttttttttttttttgcatcacttgctcttcctctaagaatctcctgacttcttgtacatgtgtctgatggtcagaattttagcactgaagtatgggcctatttatcataattcaggtttatatcctttcagatatgggctagggtctggtattagggtgctcattaaaaaatgttgatttttgtcagtgtctagtgacatcaatgcataatttaaggttctataaattgaaagctaacccaggagtgactcatcctctcattgttttcaacttacttatttctgatcacactgacttccctgtggaatacacctggttcactgtgttccaaagcttaaggagcagaaaaaggttatgctcctctcttcttgagaggttttaagagaataattgctaagctgtgaaaaacattttaaccaagtgatctaattatgtag

SEQ ID NO: 515 - DNA, 229 bp, Artificial Sequence
  Description of Artificial Sequence: Synthetic polynucleotide
gtgagccacggcagcctgagctgctcagttaggggaatttgggcctccagagaaagagatccgaagactgctggtgcttcctggtttcataagctcagtaagaagtctgaattcgttggaagctgatgatagaagaaagagttcatgcttgctttgtccatggaggtttaacaggaatgaattgctaaactgtggaaaatgttttaaacaaatgcatcttatcctgtag

SEQ ID NO: 516 - DNA, 229 bp, Artificial Sequence
  Description of Artificial Sequence: Synthetic polynucleotide
gtgagccagggcagcctgagctgctcagttaggggaatttgggcctccagagaaagagatctgaagactgctggtgcttcctggtttcataagctcagtaagaagtctgaattcattggaagctgatgatagaagaaagagttcatgcttgctttgtccatggaggtttaacaggaatgaattgctaaactgtggaaaatgttttaaacaaatgcatcttatcctgtag

SEQ ID NO: 517 - DNA, 225 bp, Artificial Sequence
  Description of Artificial Sequence: Synthetic polynucleotide
tgtgccttctagttgccagccatctgttgtttgcccctcccccgtgccttccttgaccctggaaggtgccactcccactgtcctttcctaataaaatgaggaaattgcatcgcattgtctgagtaggtgtcattctattctggggggtggggtggggcaggacagcaagggggaggattgggaagacaatagcaggcatgctggggatgcggtgggctctatggc

SEQ ID NO: 518 - DNA, 581 bp, Artificial Sequence
  Description of Artificial Sequence: Synthetic polynucleotide
gagcatcttaccgccatttattcccatatttgttctgtttttcttgatttgggtatacatttaaatgttaataaaacaaaatggtggggcaatcatttacatttttagggatatgtaattactagttcaggtgtattgccacaagacaaacatgttaagaaactttcccgttatttacgctctgttcctgttaatcaacctctggattacaaaatttgtgaaagattgactgatattcttaactatgttgctccttttacgctgtgtggatatgctgctttatagcctctgtatctagctattgcttcccgtacggctttcgttttctcctccttgtataaatcctggttgctgtctcttttagaggagttgtggcccgttgtccgtcaacgtggcgtggtgtgctctgtgtttgctgacgcaacccccactggctggggcattgccaccacctgtcaactcctttctgggactttcgctttccccctcccgatcgccacggcagaactcatcgccgcctgccttgcccgctgctggacaggggctaggttgctgggcactgataattccgtggtgttgtc

SEQ ID NO: 519 - DNA, 222 bp, Artificial Sequence
  Description of Artificial Sequence: Synthetic polynucleotide
cagacatgataagatacattgatgagtttggacaaaccacaactagaatgcagtgaaaaaaatgctttatttgtgaaatttgtgatgctattgctttatttgtaaccattataagctgcaataaacaagttaacaacaacaattgcattcattttatgtttcaggttcagggggagatgtgggaggttttttaaagcaagtaaaacctctacaaatgtggta

SEQ ID NO: 520 - DNA, 395 bp, Artificial Sequence
  Description of Artificial Sequence: Synthetic polynucleotide
taaaatacagcatagcaaaactttaacctccaaatcaagcctctacttgaatccttttctgagggatgaataaggcataggcatcaggggctgttgccaatgtgcattagctgtttgcagcctcaccttctttcatggagtttaagatatagtgtattttcccaaggtttgaactagctcttcatttctttatgttttaaatgcactgacctcccacattccctttttagtaaaatattcagaaataatttaaatacatcattgcaatgaaaataaatgttttttattaggcagaatccagatgctcaaggcccttcataatatcccccagtttagtagttggacttagggaacaaaggaacctttaatagaaattggacagcaagaaagcgagc

SEQ ID NO: 521 - DNA, 107 bp, Artificial Sequence
  Description of Artificial Sequence: Synthetic polynucleotide
gctcgctttcttgctgtccaatttctattaaaggttcctttgttccctaagtccaactactaaactgggggatattatgaagggccttgagcatctggattctgcct

SEQ ID NO: 522 - DNA, 395 bp, Artificial Sequence
  Description of Artificial Sequence: Synthetic polynucleotide
gctcgctttcttgctgtccaatttctattaaaggttcctttgttccctaagtccaactactaaactgggggatattatgaagggccttgagcatctggattctgcctaataaaaaacatttattttcattgcaatgatgtatttaaattatttctgaatattttactaaaaagggaatgtgggaggtcagtgcatttaaaacataaagaaatgaagagctagttcaaaccttgggaaaatacactatatcttaaactccatgaaagaaggtgaggctgcaaacagctaatgcacattggcaacagcccctgatgcctatgccttattcatccctcagaaaaggattcaagtagaggcttgatttggaggttaaagttttgctatgctgtatttta

SEQ ID NO: 523 - DNA, 107 bp, Artificial Sequence
  Description of Artificial Sequence: Synthetic polynucleotide
gcttgctttcttgctgtccaatttctattaaaggttcctttgttccctaagtccaactactaaactgggggatattatgaagggccttgagcatctggattctgcct

SEQ ID NO: 524 - DNA, 395 bp, Artificial Sequence
  Description of Artificial Sequence: Synthetic polynucleotide
gcttgctttcttgctgtccaatttctattaaaggttcctttgttccctaagtccaactactaaactgggggatattatgaagggccttgagcatctggattctgcctaataaaaaacatttattttcattgcaatgatgtatttaaattatttctgaatattttactaaaaagggaatgtgggaggtcagtgcatttaaaacataaagaaatgaagagctagttcaaaccttgggaaaatacactatatcttaaactccatgaaagaaggtgaggctgcaaacagctaatgcacattggcaacagcccctgatgcctatgccttattcatccctcagaaaaggattcaagtagaggcttgatttggaggttaaagttttgctatgctgtatttta

SEQ ID NO: 525 - DNA, 395 bp, Artificial Sequence
  Description of Artificial Sequence: Synthetic polynucleotide
taaaatacagcatagcaaaactttaacctccaaatcaagcctctacttgaatccttttctgagggatgaataaggcataggcatcaggggctgttgccaatgtgcattagctgtttgcagcctcaccttctttcatggagtttaagatatagtgtattttcccaaggtttgaactagctcttcatttctttatgttttaaatgcactgacctcccacattccctttttagtaaaatattcagaaataatttaaatacatcattgcaatgaaaataaatgttttttattaggcagaatccagatgctcaaggcccttcataatatcccccagtttagtagttggacttagggaacaaaggaacctttaatagaaattggacagcaagaaagcaagc

SEQ ID NO: 526 - DNA, 46 bp, Artificial Sequence
  Description of Artificial Sequence: Synthetic oligonucleotide
ctggggactttccagctggggactttccagctggggactttccagg

SEQ ID NO: 527 - DNA, 21 bp, Artificial Sequence
  Description of Artificial Sequence: Synthetic oligonucleotide
aggattagtcccccagtgcac

SEQ ID NO: 528 - DNA, 23 bp, Artificial Sequence
  Description of Artificial Sequence: Synthetic oligonucleotide
agcctgcacttagagtgtctagg

SEQ ID NO: 529 - DNA, 70 bp, Artificial Sequence
  Description of Artificial Sequence: Synthetic oligonucleotide
tggggactttccgctggggactttccgctggggactttccgctggggactttccgctggggactttccgc

SEQ ID NO: 530 - DNA, 60 bp, Artificial Sequence
  Description of Artificial Sequence: Synthetic oligonucleotide
acgggtggtacagaatgttcttttggcgtcgacacgggtggtacagaatgttcttttggc

SEQ ID NO: 531 - DNA, 15 bp, Artificial Sequence
  Description of Artificial Sequence: Synthetic oligonucleotide
tgacgtcaagatcta

SEQ ID NO: 532 - DNA, 840 bp, Artificial Sequence
  Description of Artificial Sequence: Synthetic polynucleotide
aacaggttagtttgactagctggttgctgactaattgagatgcatgctttgcatacttctgcctgctggggagcctggggactttccacacctggttgctgactaattgagatgcatgctttgcatacttctgcctgctggggagcctggggactttccacaccttaagaatgtaaattctgggtggttgctgactaattgagatgcatgctttgcatacttctgcctgctggggagcctggggactttccacacctggttgctgactaattgagatgcatgctttgcatacttctgcctgctggggagcctggggactttccacacctagttacctaatttgttagatggttgctgactaattgagatgcatgctttgcatacttctgcctgctggggagcctggggactttccacacctggttgctgactaattgagatgcatgctttgcatacttctgcctgctggggagcctggggactttccacaccaatggcactcaaacagtatgtggttgctgactaattgagatgcatgctttgcatacttctgcctgctggggagcctggggactttccacacctggttgctgactaattgagatgcatgctttgcatacttctgcctgctggggagcctggggactttccacaccacttttagtcagaggttaattggttgctgactaattgagatgcatgctttgcatacttctgcctgctggggagcctggggactttccacacctggttgctgactaattgagatgcatgctttgcatacttctgcctgctggggagcctggggactttccacaccttggctcctaggtcatgcac

SEQ ID NO: 533 - DNA, 60 bp, Artificial Sequence
  Description of Artificial Sequence: Synthetic oligonucleotide
acgggaagaacattttgtacgtttggcgtcgacacgggaagaacattttgtacgtttggc

SEQ ID NO: 534 - DNA, 72 bp, Artificial Sequence
  Description of Artificial Sequence: Synthetic oligonucleotide
tggttgctgactaattgagatgcatgctttgcatacttctgcctgctggggagcctggggactttccacacc

SEQ ID NO: 535 - DNA, 144 bp, Artificial Sequence
  Description of Artificial Sequence: Synthetic polynucleotide
tggttgctgactaattgagatgcatgctttgcatacttctgcctgctggggagcctggggactttccacacctggttgctgactaattgagatgcatgctttgcatacttctgcctgctggggagcctggggactttccacacc

SEQ ID NO: 536 - DNA, 840 bp, Artificial Sequence
  Description of Artificial Sequence: Synthetic polynucleotide
aacaggttagtttgactagctggttgctgactaattgagatgcatgctttgcatacttctgcctgctggggagcctggggactttccacacctggttgctgactaattgagatgcatgctttgcatacttctgcctgctggggagcctggggactttccacaccttaagaatgtaaattctgggtggttgctgactaattgagatgcatgctttgcatacttctgcctgctggggagcctggggactttccacacctggttgctgactaattgagatgcatgctttgcatacttctgcctgctggggagcctggggactttccacacctagttacctaatttgttagatggttgctgactaattgagatgcatgctttgcatacttctgcctgctggggagcctggggactttccacacctggttgctgactaattgagatgcatgctttgcatacttctgcctgctggggagcctggggactttccacaccaatggcactcaaacagtatgtggttgctgactaattgagatgcatgctttgcatacttctgcctgctggggagcctggggactttccacacctggttgctgactaattgagatgcatgctttgcatacttctgcctgctggggagcctggggactttccacaccacttttagtcagaggttaattggttgctgactaattgagatgcatgctttgcatacttctgcctgctggggagcctggggactttccacacctggttgctgactaattgagatgcatgctttgcatacttctgcctgctggggagcctggggactttccacaccttggctcctagatcatgcac

SEQ ID NO: 537 - DNA, 9 bp, Artificial Sequence
  Description of Artificial Sequence: Synthetic oligonucleotide
gccgccacc

SEQ ID NO: 538 - DNA, 7 bp, Artificial Sequence
  Description of Artificial Sequence: Synthetic oligonucleotide
agccacc

SEQ ID NO: 539 - DNA, 10 bp, Artificial Sequence
  Description of Artificial Sequence: Synthetic oligonucleotide
cgcagccacc

SEQ ID NO: 540 - DNA, 3 bp, Artificial Sequence
  Description of Artificial Sequence: Synthetic oligonucleotide
acc

SEQ ID NO: 541 - DNA, 6558 bp, Artificial Sequence
  Description of Artificial Sequence: Synthetic polynucleotide
cctgcaggcagctgcgcgctcgctcgctcactgaggccgcccgggcaaagcccgggcgtcgggcgacctttggtcgcccggcctcagtgagcgagcgagcgcgcagagagggagtggccaactccatcactaggggttccttgtagttaatgattaacccgccatgctacttatcgcggccgcgtccaagccactctaaagggcaatctggcagcactttgtgaaattaagagtgcatgttccctatgattcataatagcaccactcttctatcccagaaaatttctaccccaggcctataagggaagaaagataaggaaatttatcacagtattgtttggggtggtgaaaaattagcaatgacttagatgtccataactggaaaataaagaagtcaagtgtggcaaatacacactgggatattctgaaccatttagaaaagcaaagaactagatacatattcagcagcatggctggatcctaagaacacagttgaaagaaaaaagaaactatgaaatctatagtacatccatagattgtagtaaatctatagtgccacatcacatatccatgaaaaatacatatacgcacaaacatttctatgtattttacaagttcaaggctaaacatcatattagagaagttgcctctggggaaaggcagtgagagtgaggaattatgataaaagagaatgaataaaaaaacaagagaagggtcatgtaggttttgtttctgtgccatgaactcatggattatgattaactcaaccttctgcacatgaagataaacaagaaagaactgataaacctgcaatggttgggtaatcttcaacttccaaatcagcaaaggtcagctctaagtttgccaagtacacaacttctcatcttgtgacatgttccccacctctgtgcagtgttaaaaaatacctcagtggtctactgactgactgtggatgcttcttctagatgtgcctttttttcctccatttccttagcacccagcactgctctcattatagcagcacattgcattccaaccaaattgaacaaaaaggtggcttaaaaatcatctgcaagtttatggcacaagcaatctcttatttttatcttagtgcataaataaatttttcctttttgccagaataattttttttaaagaagcgattagtttttcttctctcagatagcaatgatgtgctttcctctcaacctagatttagggcatttttatgtgagataggattaaaaattccatttttgtacaaccactatggagaacagtttggcagttccccaaaaaactaaaaatagagctactatatgatctagtgatcccactgctgggtatatacctataagaaaggaaatcagtatatcaaagagatgtctgttcttttatgtttgttgcagcactgttcacaatagccaagatctggaagcaacccaagtctccatcaacatgggttttaaaaaaatgtggtactttaatacacaatggagtactattcagcaataaaaaagaatgagatcctgttatttgcaataacatggacagaactggaggtcattatgtcaaatgaaataagccaggcacagaaagccaaacatcacatattctcactcatatgtggggtctaaaaatcaaaacaatctgattcatggagctagagagtagagagctaattaccagaggtggggaagggtagtaggggcctggaggggaggtggagatggttaataggtacaaaaaaatatagaaagaatgaataagacctagtatttgatagtacaacagggcgaatatagtcaaaataatttaattatacatttaaaaatacctgaaagagtataattggcttgtttgcaacacaaaagataaatgcttgaggggatggatgccccattttcaatgatgtgattattacacattgcatgcctgtatcaaaatattgcacatactccatgaatgcatacatctactatgttcccacaaaaattaaacattagaaaaaagagttgcattttcagctgttatggggagaagaaagaaaagctatcattttgttgtcctaaaaattatgttgtcctcatttcaaacaggaaagcaaaagtatttgagagccagtgcagtgccttggtgttgggtgaaacatagattgaatttgggccatttgtttaaacttcctaggcctcagtttcttgcctattaaaagggagtgcatagttcatgggattgttaagaggaagaagtgaaaccatgcacgtggagagcgtggcacagtgtctaagacagagtgtgcatgcaaataagtagataatattctttgcttttctttattgcatgcctgtaatatttttggagttgtcacattcattgccctcaagtagcatcaagggatgaaattatgtttgtaagaaaatcctgaggctgaggaatacaacatgttttatgtctactacactgaaaaatgccggagtcagataaagaatacagattctcctgaggatggaaatcaagatcttcgccttcaatatttaacaacattgagcttccaacttactatgggaaatattcatcaggcccctaaaggttccttttggacagaaattgcacttgttatatctgtattcttagcagacagtagacagcctggcacatcataaaggcttaaggaatcctaaatatcccttaaaattctcattttaaagacaaaaacaaaacaaaaaaaaaaaacaaaaaaaaactgaggcatgggcttgaccaaatcagtggtagaaccaagagttaaaccacttgttttgaatcctaaacctgagttttattttacttatttatttatttatttgtttatttattttcagatgcttggtcaaagaacagtgggaggagagggatgggcttccagcaacctttattattggcttattttcttacagcccattactttctcttgggaaaatattaagcaggcactcaaggcttgaggcccctgagttttcacatcctttctgaacctctgaacctgctttccagcattcttttatactttgttttacctcctggtcagtaatgcctcaccctcagtcttctctaaaagtgtggttaatggcatcttcctgactatttgaagaccactggccaaatcccaccagctcactcatagaccatccccctactttactttcttcaaaagacttagccctacctaaacttatttatatgtttattttctgcccaccagaatggcagcatagctggggaggcagagtctgttttgttcattgctgtattcccaaagactagaacaccaccaagcacacggtacaggtctcagtaattattgtcaaatttatgtggatttgcttttaaacaatatcttccatttactgagtgtttatgtggaagaactgtactaaattttaatgcatttctttattcctattcttaaaaccttccagcaaggtggctctaccaccctcttttccgagcttcaggagcagttgtgcgaatagctggagaacaccaggctggatttaaacccagatcgctcttacatttgctctttacctgctgtgctcagcgttcacgtgccctctagctgtagttttctgaagtcagcgcacagcaaggcagtgtgcttagaggttaacagaagggaaaacaacaacaacaaaaatctaaatgagaatcctgactgtttcagctgggggtaaggggggcggattattcatataattgttataccagacggtcgcaggcttagtccaattgcagagaactcgcttcccaggcttctgagagtcccggaagtgcctaaacctgtctaatcgacggggcttgggtggcccgtcgctccctggcttcttccctttacccagggcgggcagcgaagtggtgcctcctgcgtcccccacaccctccctcagcccctcccctccggcccgtcctgggcaggtgacctggagcatccggcaggctgccctggcctcctgcgtcaggacaacgcccacgaggggcgttactgtgcggagatgcaccacgcaagagacaccctttgtaactctcttctcctccctagtgcgaggttaaaaccttcagccccacgtgctgtttgcaaacctgcctgtacctgaggccctaaaaagccagagacctcactcccggggagccagcgtttaaaccgcagccaccatgagcaccgccgtgctggaaaatcctggcctgggcagaaagctgagcgacttcggccaagagacaagctacatcgaggacaactgcaaccagaacggcgccatcagcctgatcttcagcctgaaagaagaagtgggcgccctggccaaggtgctgagactgttcgaagagaacgacgtgaacctgacacacatcgagagcagacccagcagactgaagaaggacgagtacgagttcttcacccacctggacaagcggagcctgcctgctctgaccaacatcatcaagatcctgcggcacgacatcggcgccacagtgcacgaactgagccgggacaagaaaaaggacaccgtgccatggttccccagaaccatccaagagctggacagattcgccaaccagatcctgagctatggcgccgagctggacgctgatcaccctggctttaaggaccccgtgtaccgggccagaagaaagcagtttgccgatatcgcctacaactaccggcacggccagcctattcctcgggtcgagtacatggaagaggaaaagaaaacctggggcaccgtgttcaagaccctgaagtccctgtacaagacccacgcctgctacgagtacaaccacatcttcccactgctcgaaaagtactgcggcttccacgaggacaatatccctcagcttgaggacgtgtcccagttcctgcagacctgcaccggctttagactgaggccagttgccggactgctgagcagcagagattttctcggcggcctggccttcagagtgttccactgtacccagtacatcagacacggcagcaagcccatgtacacccctgagcctgatatctgccacgagctgctgggacatgtgcccctgttcagcgatagaagcttcgcccagttcagccaagagatcggactggcttctctgggagcccctgacgagtacattgagaagctggccaccatctactggttcaccgtggaattcggcctgtgcaagcagggcgacagcatcaaagcttatggcgctggcctgctgtctagcttcggcgagctgcagtactgtctgagcgagaagcctaagctgctgcccctggaactggaaaagaccgccatccagaactacaccgtgaccgagttccagcctctgtactacgtggccgagagcttcaacgacgccaaagaaaaagtgcggaacttcgccgccaccattcctcggcctttcagcgtcagatacgacccctacacacagcggatcgaggtgctggacaacacacagcagctgaaaattctggccgactccatcaacagcgagatcggcatcctgtgcagcgccctgcagaaaatcaagtgatagttaattaagagcatcttaccgccatttattcccatatttgttctgtttttcttgatttgggtatacatttaaatgttaataaaacaaaatggtggggcaatcatttacatttttagggatatgtaattactagttcaggtgtattgccacaagacaaacatgttaagaaactttcccgttatttacgctctgttcctgttaatcaacctctggattacaaaatttgtgaaagattgactgatattcttaactatgttgctccttttacgctgtgtggatatgctgctttatagcctctgtatctagctattgcttcccgtacggctttcgttttctcctccttgtataaatcctggttgctgtctcttttagaggagttgtggcccgttgtccgtcaacgtggcgtggtgtgctctgtgtttgctgacgcaacccccactggctggggcattgccaccacctgtcaactcctttctgggactttcgctttccccctcccgatcgccacggcagaactcatcgccgcctgccttgcccgctgctggacaggggctaggttgctgggcactgataattccgtggtgttgtctgtgccttctagttgccagccatctgttgtttgcccctcccccgtgccttccttgaccctggaaggtgccactcccactgtcctttcctaataaaatgaggaaattgcatcgcattgtctgagtaggtgtcattctattctggggggtggggtggggcaggacagcaagggggaggattgggaagacaatagcaggcatgctggggatgcggtgggctctatggctctagagcatggctacgtagataagtagcatggcgggttaatcattaactacacctgcaggaggaacccctagtgatggagttggccactccctctctgcgcgctcgctcgctcactgaggccgggcgaccaaaggtcgcccgacgcccgggcggcctcagtgagcgagcgagcgcgcagctgcctgcagg

SEQ ID NO: 542 - DNA, 6642 bp, Artificial Sequence
  Description of Artificial Sequence: Synthetic polynucleotide
cctgcaggcagctgcgcgctcgctcgctcactgaggccgcccgggcaaagcccgggcgtcgggcgacctttggtcgcccggcctcagtgagcgagcgagcgcgcagagagggagtggccaactccatcactaggggttccttgtagttaatgattaacccgccatgctacttatcgcggccgcgtccaagccactctaaagggcaatctggcagcactttgtgaaattaagagtgcatgttccctatgattcataatagcaccactcttctatcccagaaaatttctaccccaggcctataagggaagaaagataaggaaatttatcacagtattgtttggggtggtgaaaaattagcaatgacttagatgtccataactggaaaataaagaagtcaagtgtggcaaatacacactgggatattctgaaccatttagaaaagcaaagaactagatacatattcagcagcatggctggatcctaagaacacagttgaaagaaaaaagaaactatgaaatctatagtacatccatagattgtagtaaatctatagtgccacatcacatatccatgaaaaatacatatacgcacaaacatttctatgtattttacaagttcaaggctaaacatcatattagagaagttgcctctggggaaaggcagtgagagtgaggaattatgataaaagagaatgaataaaaaaacaagagaagggtcatgtaggttttgtttctgtgccatgaactcatggattatgattaactcaaccttctgcacatgaagataaacaagaaagaactgataaacctgcaatggttgggtaatcttcaacttccaaatcagcaaaggtcagctctaagtttgccaagtacacaacttctcatcttgtgacatgttccccacctctgtgcagtgttaaaaaatacctcagtggtctactgactgactgtggatgcttcttctagatgtgcctttttttcctccatttccttagcacccagcactgctctcattatagcagcacattgcattccaaccaaattgaacaaaaaggtggcttaaaaatcatctgcaagtttatggcacaagcaatctcttatttttatcttagtgcataaataaatttttcctttttgccagaataattttttttaaagaagcgattagtttttcttctctcagatagcaatgatgtgctttcctctcaacctagatttagggcatttttatgtgagataggattaaaaattccatttttgtacaaccactatggagaacagtttggcagttccccaaaaaactaaaaatagagctactatatgatctagtgatcccactgctgggtatatacctataagaaaggaaatcagtatatcaaagagatgtctgttcttttatgtttgttgcagcactgttcacaatagccaagatctggaagcaacccaagtctccatcaacatgggttttaaaaaaatgtggtactttaatacacaatggagtactattcagcaataaaaaagaatgagatcctgttatttgcaataacatggacagaactggaggtcattatgtcaaatgaaataagccaggcacagaaagccaaacatcacatattctcactcatatgtggggtctaaaaatcaaaacaatctgattcatggagctagagagtagagagctaattaccagaggtggggaagggtagtaggggcctggaggggaggtggagatggttaataggtacaaaaaaatatagaaagaatgaataagacctagtatttgatagtacaacagggcgaatatagtcaaaataatttaattatacatttaaaaatacctgaaagagtataattggcttgtttgcaacacaaaagataaatgcttgaggggatggatgccccattttcaatgatgtgattattacacattgcatgcctgtatcaaaatattgcacatactccatgaatgcatacatctactatgttcccacaaaaattaaacattagaaaaaagagttgcattttcagctgttatggggagaagaaagaaaagctatcattttgttgtcctaaaaattatgttgtcctcatttcaaacaggaaagcaaaagtatttgagagccagtgcagtgccttggtgttgggtgaaacatagattgaatttgggccatttgtttaaacttcctaggcctcagtttcttgcctattaaaagggagtgcatagttcatgggattgttaagaggaagaagtgaaaccatgcacgtggagagcgtggcacagtgtctaagacagagtgtgcatgcaaataagtagataatattctttgcttttctttattgcatgcctgtaatatttttggagttgtcacattcattgccctcaagtagcatcaagggatgaaattatgtttgtaagaaaatcctgaggctgaggaatacaacatgttttatgtctactacactgaaaaatgccggagtcagataaagaatacagattctcctgaggatggaaatcaagatcttcgccttcaatatttaacaacattgagcttccaacttactatgggaaatattcatcaggcccctaaaggttccttttggacagaaattgcacttgttatatctgtattcttagcagacagtagacagcctggcacatcataaaggcttaaggaatcctaaatatcccttaaaattctcattttaaagacaaaaacaaaacaaaaaaaaaaaacaaaaaaaaactgaggcatgggcttgaccaaatcagtggtagaaccaagagttaaaccacttgttttgaatcctaaacctgagttttattttacttatttatttatttatttgtttatttattttcagatgcttggtcaaagaacagtgggaggagagggatgggcttccagcaacctttattattggcttattttcttacagcccattactttctcttgggaaaatattaagcaggcactcaaggcttgaggcccctgagttttcacatcctttctgaacctctgaacctgctttccagcattcttttatactttgttttacctcctggtcagtaatgcctcaccctcagtcttctctaaaagtgtggttaatggcatcttcctgactatttgaagaccactggccaaatcccaccagctcactcatagaccatccccctactttactttcttcaaaagacttagccctacctaaacttatttatatgtttattttctgcccaccagaatggcagcatagctggggaggcagagtctgttttgttcattgctgtattcccaaagactagaacaccaccaagcacacggtacaggtctcagtaattattgtcaaatttatgtggatttgcttttaaacaatatcttccatttactgagtgtttatgtggaagaactgtactaaattttaatgcatttctttattcctattcttaaaaccttccagcaaggtggctctaccaccctcttttccgagcttcaggagcagttgtgcgaatagctggagaacaccaggctggatttaaacccagatcgctcttacatttgctctttacctgctgtgctcagcgttcacgtgccctctagctgtagttttctgaagtcagcgcacagcaaggcagtgtgcttagaggttaacagaagggaaaacaacaacaacaaaaatctaaatgagaatcctgactgtttcagctgggggtaaggggggcggattattcatataattgttataccagacggtcgcaggcttagtccaattgcagagaactcgcttcccaggcttctgagagtcccggaagtgcctaaacctgtctaatcgacggggcttgggtggcccgtcgctccctggcttcttccctttacccagggcgggcagcgaagtggtgcctcctgcgtcccccacaccctccctcagcccctcccctccggcccgtcctgggcaggtgacctggagcatccggcaggctgccctggcctcctgcgtcaggacaacgcccacgaggggcgttactgtgcggagatgcaccacgcaagagacaccctttgtaactctcttctcctccctagtgcgaggttaaaaccttcagccccacgtgctgtttgcaaacctgcctgtacctgaggccctaaaaagccagagacctcactcccggggaagaggtaagggtttaagggatggttggttggtggggtattaatgtttaattacctggagcacctgcctgaaatcactttttttcaggttggtttaaaccgcagccaccatgagcaccgccgtgctggaaaatcctggcctgggcagaaagctgagcgacttcggccaagagacaagctacatcgaggacaactgcaaccagaacggcgccatcagcctgatcttcagcctgaaagaagaagtgggcgccctggccaaggtgctgagactgttcgaagagaacgacgtgaacctgacacacatcgagagcagacccagcagactgaagaaggacgagtacgagttcttcacccacctggacaagcggagcctgcctgctctgaccaacatcatcaagatcctgcggcacgacatcggcgccacagtgcacgaactgagccgggacaagaaaaaggacaccgtgccatggttccccagaaccatccaagagctggacagattcgccaaccagatcctgagctatggcgccgagctggacgctgatcaccctggctttaaggaccccgtgtaccgggccagaagaaagcagtttgccgatatcgcctacaactaccggcacggccagcctattcctcgggtcgagtacatggaagaggaaaagaaaacctggggcaccgtgttcaagaccctgaagtccctgtacaagacccacgcctgctacgagtacaaccacatcttcccactgctcgaaaagtactgcggcttccacgaggacaatatccctcagcttgaggacgtgtcccagttcctgcagacctgcaccggctttagactgaggccagttgccggactgctgagcagcagagattttctcggcggcctggccttcagagtgttccactgtacccagtacatcagacacggcagcaagcccatgtacacccctgagcctgatatctgccacgagctgctgggacatgtgcccctgttcagcgatagaagcttcgcccagttcagccaagagatcggactggcttctctgggagcccctgacgagtacattgagaagctggccaccatctactggttcaccgtggaattcggcctgtgcaagcagggcgacagcatcaaagcttatggcgctggcctgctgtctagcttcggcgagctgcagtactgtctgagcgagaagcctaagctgctgcccctggaactggaaaagaccgccatccagaactacaccgtgaccgagttccagcctctgtactacgtggccgagagcttcaacgacgccaaagaaaaagtgcggaacttcgccgccaccattcctcggcctttcagcgtcagatacgacccctacacacagcggatcgaggtgctggacaacacacagcagctgaaaattctggccgactccatcaacagcgagatcggcatcctgtgcagcgccctgcagaaaatcaagtgatagttaattaagagcatcttaccgccatttattcccatatttgttctgtttttcttgatttgggtatacatttaaatgttaataaaacaaaatggtggggcaatcatttacatttttagggatatgtaattactagttcaggtgtattgccacaagacaaacatgttaagaaactttcccgttatttacgctctgttcctgttaatcaacctctggattacaaaatttgtgaaagattgactgatattcttaactatgttgctccttttacgctgtgtggatatgctgctttatagcctctgtatctagctattgcttcccgtacggctttcgttttctcctccttgtataaatcctggttgctgtctcttttagaggagttgtggcccgttgtccgtcaacgtggcgtggtgtgctctgtgtttgctgacgcaacccccactggctggggcattgccaccacctgtcaactcctttctgggactttcgctttccccctcccgatcgccacggcagaactcatcgccgcctgccttgcccgctgctggacaggggctaggttgctgggcactgataattccgtggtgttgtctgtgccttctagttgccagccatctgttgtttgcccctcccccgtgccttccttgaccctggaaggtgccactcccactgtcctttcctaataaaatgaggaaattgcatcgcattgtctgagtaggtgtcattctattctggggggtggggtggggcaggacagcaagggggaggattgggaagacaatagcaggcatgctggggatgcggtgggctctatggctctagagcatggctacgtagataagtagcatggcgggttaatcattaactacacctgcaggaggaacccctagtgatggagttggccactccctctctgcgcgctcgctcgctcactgaggccgggcgaccaaaggtcgcccgacgcccgggcggcctcagtgagcgagcgagcgcgcagctgcctgcagg

SEQ ID NO: 543 - DNA, 2967 bp, Artificial Sequence
  Description of Artificial Sequence: Synthetic polynucleotide
cctgcaggcagctgcgcgctcgctcgctcactgaggccgcccgggcaaagcccgggcgtcgggcgacctttggtcgcccggcctcagtgagcgagcgagcgcgcagagagggagtggccaactccatcactaggggttccttgtagttaatgattaacccgccatgctacttatcgcggccgccgggggaggctgctggtgaatattaaccaaggtcaccccagttatcggaggagcaaacaggggctaagtccacacgcgtggtaccgtctgtctgcacatttcgtagagcgagtgttccgatactctaatctccctaggcaaggttcatatttgtgtaggttacttattctccttttgttgactaagtcaataatcagaatcagcaggtttggagtcagcttggcagggatcagcagcctgggttggaaggagggggtataaaagccccttcaccaggagaagccgtcacacagatccacaagctcctgaagaggtaagggtttaagggatggttggttggtggggtattaatgtttaattacctggagcacctgcctgaaatcactttttttcaggttggtttaaaccgcagccaccatgagtacagcagtgttagagaatccaggcctaggtagaaagctgtctgactttggccaggagacctcctacattgaggacaactgcaaccagaatggagccatcagcctgatcttcagcctgaaggaggaggtgggagccctggccaaggtgctgagactgtttgaggagaatgatgtgaacctgacccacattgagtccagaccctccagactgaagaaggatgagtatgagttcttcacccacctggacaagagatccctgcctgctctgaccaacatcatcaagatcctgagacatgatattggagccacagtgcatgagctgagcagggacaagaagaaggacacagtgccttggttccccagaaccatccaggagctggacaggtttgccaaccagatcctgtcctatggagctgagctggatgctgaccaccctggatttaaggatcctgtgtacagggccagaaggaagcagtttgctgacattgcctacaactacaggcatggccagcccatccccagggtggagtacatggaggaggagaagaagacctggggcactgtgttcaagaccctgaagagcctgtacaagacccatgcctgctatgagtacaaccacatcttccccctgctggagaagtactgtggcttccatgaggacaacatccctcagctggaggatgtgtcccagttcctgcagacctgcacaggcttcagactgagacctgtggctggcctgctgtctagcagagacttcctgggaggcctggccttcagagtgttccactgcacccagtacatcagacatggaagcaagcccatgtacacccctgagccagacatctgccatgagctgctgggccatgtgcccctgttctctgatagatcctttgcccagttcagccaggagattggcctggccagcctgggagcccctgatgagtacattgagaagctggccaccatctactggttcacagtggagtttggcctgtgcaagcagggagactccatcaaggcctatggagctggactgctgtcctcctttggagagctgcagtactgcctgtctgagaagcccaagctgctgcccctggagctggagaagacagccatccagaactacacagtgacagagttccagcccctgtactatgtggctgagagcttcaatgatgccaaggagaaggtgagaaactttgctgccaccatccccagacccttctctgtgaggtatgacccctacacccagaggattgaggtgctggacaacacccagcagctgaagatcctggctgactccatcaactctgagattggcatcctgtgctctgccctgcagaagatcaagtaaaccttaattaagagcatcttaccgccatttattcccatatttgttctgtttttcttgatttgggtatacatttaaatgttaataaaacaaaatggtggggcaatcatttacatttttagggatatgtaattactagttcaggtgtattgccacaagacaaacatgttaagaaactttcccgttatttacgctctgttcctgttaatcaacctctggattacaaaatttgtgaaagattgactgatattcttaactatgttgctccttttacgctgtgtggatatgctgctttatagcctctgtatctagctattgcttcccgtacggctttcgttttctcctccttgtataaatcctggttgctgtctcttttagaggagttgtggcccgttgtccgtcaacgtggcgtggtgtgctctgtgtttgctgacgcaacccccactggctggggcattgccaccacctgtcaactcctttctgggactttcgctttccccctcccgatcgccacggcagaactcatcgccgcctgccttgcccgctgctggacaggggctaggttgctgggcactgataattccgtggtgttgtctgtgccttctagttgccagccatctgttgtttgcccctcccccgtgccttccttgaccctggaaggtgccactcccactgtcctttcctaataaaatgaggaaattgcatcgcattgtctgagtaggtgtcattctattctggggggtggggtggggcaggacagcaagggggaggattgggaagacaatagcaggcatgctggggatgcggtgggctctatggctctagagcatggctacgtagataagtagcatggcgggttaatcattaactacacctgcaggaggaacccctagtgatggagttggccactccctctctgcgcgctcgctcgctcactgaggccgggcgaccaaaggtcgcccgacgcccgggcggcctcagtgagcgagcgagcgcgcagctgcctgcagg

SEQ ID NO: 544 - DNA, 2967 bp, Artificial Sequence
  Description of Artificial Sequence: Synthetic polynucleotide
cctgcaggcagctgcgcgctcgctcgctcactgaggccgcccgggcaaagcccgggcgtcgggcgacctttggtcgcccggcctcagtgagcgagcgagcgcgcagagagggagtggccaactccatcactaggggttccttgtagttaatgattaacccgccatgctacttatcgcggccgccgggggaggctgctggtgaatattaaccaaggtcaccccagttatcggaggagcaaacaggggctaagtccacacgcgtggtaccgtctgtctgcacatttcgtagagcgagtgttccgatactctaatctccctaggcaaggttcatatttgtgtaggttacttattctccttttgttgactaagtcaataatcagaatcagcaggtttggagtcagcttggcagggatcagcagcctgggttggaaggagggggtataaaagccccttcaccaggagaagccgtcacacagatccacaagctcctgaagaggtaagggtttaagggatggttggttggtggggtattaatgtttaattacctggagcacctgcctgaaatcactttttttcaggttggtttaaaccgcagccaccatgtccacagctgtgctggagaaccctggcctgggcagaaagctgtctgactttggccaggagacctcctacattgaggacaactgcaaccagaatggagccatctccctgatcttctccctgaaggaggaggtgggagccctggccaaggtgctgagactgtttgaggagaatgatgtgaacctgacccacattgagtccagaccctccagactgaagaaggatgagtatgagttcttcacccacctggacaagagatccctgcctgccctgaccaacatcatcaagatcctgagacatgacattggagccacagtgcatgagctgtccagagacaagaagaaggacacagtgccctggttccccagaaccatccaggagctggacagatttgccaaccagatcctgtcctatggagctgagctggatgctgaccaccctggcttcaaggaccctgtgtacagggccagaagaaagcagtttgctgacattgcctacaactacagacatggccagcccatccccagagtggagtacatggaggaggagaagaagacctggggcacagtgttcaagaccctgaagtccctgtacaagacccatgcctgctatgagtacaaccacatcttccccctgctggagaagtactgtggcttccatgaggacaacatcccccagctggaggatgtgtcccagttcctgcagacctgcacaggcttcagactgagacctgtggctggcctgctgtcctccagagacttcctgggaggcctggccttcagagtgttccactgcacccagtacatcagacatggctccaagcccatgtacacccctgagcctgacatctgccatgagctgctgggccatgtgcccctgttctctgacagatcctttgcccagttctcccaggagattggcctggcctccctgggagcccctgatgagtacattgagaagctggccaccatctactggttcacagtggagtttggcctgtgcaagcagggagactccatcaaggcctatggagctggcctgctgtcctcctttggagagctgcagtactgcctgtctgagaagcccaagctgctgcccctggagctggagaagacagccatccagaactacacagtgacagagttccagcccctgtactatgtggctgagtccttcaatgatgccaaggagaaggtcagaaactttgctgccaccatccccagacccttctctgtgagatatgacccctacacccagagaattgaggtgctggacaacacccagcagctgaagatcctggctgactccatcaactctgagattggcatcctgtgctctgccctgcagaagatcaagtaaaccttaattaagagcatcttaccgccatttattcccatatttgttctgtttttcttgatttgggtatacatttaaatgttaataaaacaaaatggtggggcaatcatttacatttttagggatatgtaattactagttcaggtgtattgccacaagacaaacatgttaagaaactttcccgttatttacgctctgttcctgttaatcaacctctggattacaaaatttgtgaaagattgactgatattcttaactatgttgctccttttacgctgtgtggatatgctgctttatagcctctgtatctagctattgcttcccgtacggctttcgttttctcctccttgtataaatcctggttgctgtctcttttagaggagttgtggcccgttgtccgtcaacgtggcgtggtgtgctctgtgtttgctgacgcaacccccactggctggggcattgccaccacctgtcaactcctttctgggactttcgctttccccctcccgatcgccacggcagaactcatcgccgcctgccttgcccgctgctggacaggggctaggttgctgggcactgataattccgtggtgttgtctgtgccttctagttgccagccatctgttgtttgcccctcccccgtgccttccttgaccctggaaggtgccactcccactgtcctttcctaataaaatgaggaaattgcatcgcattgtctgagtaggtgtcattctattctggggggtggggtggggcaggacagcaagggggaggattgggaagacaatagcaggcatgctggggatgcggtgggctctatggctctagagcatggctacgtagataagtagcatggcgggttaatcattaactacacctgcaggaggaacccctagtgatggagttggccactccctctctgcgcgctcgctcgctcactgaggccgggcgaccaaaggtcgcccgacgcccgggcggcctcagtgagcgagcgagcgcgcagctgcctgcagg

SEQ ID NO: 545 - DNA, 3977 bp, Artificial Sequence
  Description of Artificial Sequence: Synthetic polynucleotide
cctgcaggcagctgcgcgctcgctcgctcactgaggccgcccgggcaaagcccgggcgtcgggcgacctttggtcgcccggcctcagtgagcgagcgagcgcgcagagagggagtggccaactccatcactaggggttccttgtagttaatgattaacccgccatgctacttatcgcggccgcgttaatcattaacgcttgtactttggtacagttaatcattaacgcttgtactttggtacagttaatcattaacgcttgtactttggtacaatcgatgcgagaacttgtgcctccccgtgttcctgctctttgtccctctgtcctacttagactaatatttgccttgggtactgcaaacaggaaatgggggagggacaggagtagggcggagggtagcccggggattctgcagtgagagcagagggccagctaagtggtactctcccagagactgtctgactcacgccaccccctccaccttggacacaggacgctgtggtttctgagccaggtacaatgactcctttcggtaagtgcagtggaagctgtacactgcccaggcaaagcgtccgggcagcgtaggcgggcgactcagatcccagccagtggacttagcccctgtttgctcctccgataactggggtgaccttggttaatattcaccagcagcctcccccgttgcccctctggatccactgcttaaatacggacgaggacagggccctgtctcctcagcttcaggcaccaccactgacctgggacagtgaatgtttaaaccgcagccaccatgagcaccgccgtgctggaaaatcctggcttgggcaggaaactctctgactttggacaggtaagcctgttgggcttccactgctaggagagaattggttccccacatgtgaaagcagtctgggaaatgctggtatttccagtctcctaaggctactaagaaatatgactttatttagaggcgaggaaaatgcccaggaagtcaactgatgagtctagtcttaacaagttgaggatacagaaagttggggatctgagctgctaccaacatctgtgtgtctttgggtggctcattggtatcctctgcctattggctttatcttctgtacactgaaaggaaatggctggtccttagtcacctacccaggtcttggatccatagcctacggatgtcccatttttattgctttttatattttgtctcccagtgtctttttgaggattttttttttttttttgcatcacttgctcttcctctaagaatctcctgacttcttgtacatgtgtctgatggtcagaattttagcactgaagtatgggcgtatttatcataattcaggtttatatcctttcagatatgggctagggtctggtattagggtgctcattaaaaaatgttgatttttgtcagtgtctagtgacatcaatgcataatttaaggttctataaattgaaagctaacccaggagtgactcatcctctcattgttttcaacttacttatttctgatcacactgacttccctgtggaatacacgtggttcactgtgttccaaagcttaacgagcagaaaaaggttatgctcgtctcttcttgagaggttttaagagaataattgctaagctgtgaaaaacattttaaccaagtgatctaattatgtaggaaacaagctatattgaagacaactgcaatcaaaacggcgccatcagcctgatcttcagcctgaaagaagaagtgggcgccctggccaaggtgctgagactgttcgaagagaacgacgtgaacctgacacacatcgagagcagacccagcagactgaagaaggacgagtacgagttcttcacccacctggacaagcggagcctgcctgctctgaccaacatcatcaagatcctgcggcacgacatcggcgccacagtgcacgaactgagccgggacaagaaaaaggacaccgtgccatggttccccagaaccatccaagagctggacagattcgccaaccagatcctgagctatggcgccgagctggacgctgatcaccctggctttaaggaccccgtgtaccgggccagaagaaagcagtttgccgatatcgcctacaactaccggcacggccagcctattcctcgggtcgagtacatggaagaggaaaagaaaacctggggcaccgtgttcaagaccctgaagtccctgtacaagacccacgcctgctacgagtacaaccacatcttcccactgctcgaaaagtactgcggcttccacgaggacaatatccctcagcttgaggacgtgtcccagttcctgcagacctgcaccggctttagactgaggccagttgccggactgctgagcagcagagattttctcggcggcctggccttcagagtgttccactgtacccagtacatcagacacggcagcaagcccatgtacacccctgagcctgatatctgccacgagctgctgggacatgtgcccctgttcagcgatagaagcttcgcccagttcagccaagagatcggactggcttctctgggagcccctgacgagtacattgagaagctggccaccatctactggttcaccgtggaattcggcctgtgcaagcagggcgacagcatcaaagcttatggcgctggcctgctgtctagcttcggcgagctgcagtactgtctgagcgagaagcctaagctgctgcccctggaactggaaaagaccgccatccagaactacaccgtgaccgagttccagcctctgtactacgtggccgagagcttcaacgacgccaaagaaaaagtgcggaacttcgccgccaccattcctcggcctttcagcgtcagatacgacccctacacacagcggatcgaggtgctggacaacacacagcagctgaaaattctggccgactccatcaacagcgagatcggcatcctgtgcagcgccctgcagaaaatcaagtgatagttaattaagagcatcttaccgccatttattcccatatttgttctgtttttcttgatttgggtatacatttaaatgttaataaaacaaaatggtggggcaatcatttacatttttagggatatgtaattactagttcaggtgtattgccacaagacaaacatgttaagaaactttcccgttatttacgctctgttcctgttaatcaacctctggattacaaaatttgtgaaagattgactgatattcttaactatgttgctccttttacgctgtgtggatatgctgctttatagcctctgtatctagctattgcttcccgtacggctttcgttttctcctccttgtataaatcctggttgctgtctcttttagaggagttgtggcccgttgtccgtcaacgtggcgtggtgtgctctgtgtttgctgacgcaacccccactggctggggcattgccaccacctgtcaactcctttctgggactttcgctttccccctcccgatcgccacggcagaactcatcgccgcctgccttgcccgctgctggacaggggctaggttgctgggcactgataattccgtggtgttgtctgtgccttctagttgccagccatctgttgtttgcccctcccccgtgccttccttgaccctggaaggtgccactcccactgtcctttcctaataaaatgaggaaattgcatcgcattgtctgagtaggtgtcattctattctggggggtggggtggggcaggacagcaagggggaggattgggaagacaatagcaggcatgctggggatgcggtgggctctatggctctagagcatggctacgtagataagtagcatggcgggttaatcattaactacacctgcaggaggaacccctagtgatggagttggccactccctctctgcgcgctcgctcgctcactgaggccgggcgaccaaaggtcgcccgacgcccgggcggcctcagtgagcgagcgagcgcgcagctgcctgcagg

SEQ ID NO: 546 - DNA, 4061 bp, Artificial Sequence
  Description of Artificial Sequence: Synthetic polynucleotide
cctgcaggcagctgcgcgctcgctcgctcactgaggccgcccgggcaaagcccgggcgtcgggcgacctttggtcgcccggcctcagtgagcgagcgagcgcgcagagagggagtggccaactccatcactaggggttccttgtagttaatgattaacccgccatgctacttatcgcggccgcagcaacagatcattctatgggttaatcattaacaacaggttaggcttgtactttggtacattggctcctagttaatcattaacttagcaatgtgcttgtactttggtacatagttacctagttaatcattaacaaacagtatggcttgtactttggtacaagcaacagatcattctatgggcgagaacttgtgcctccccgtgttcctgctctttgtccctctgtcctacttagactaatatttgccttgggtactgcaaacaggaaatgggggagggacaggagtagggcggagggtagcaattggattctgcagtgagagcagagggccagctaagtggtactctcccagagactgtctgactcacgccaccccctccaccttggacacaggacgctgtggtttctgagccaggtacaatgactcctttcggtaagtgcagtggaagctgtacactgcccaggcaaagcgtccgggcagcgtaggcgggcgactcagatcccagccagtggacttagcccctgtttgctcctccgataactggggtgaccttggttaatattcaccagcagcctcccccgttgcccctctggatccactgcttaaatacggacgaggacagggccctgtctcctcagcttcaggcaccaccactgacctgggacagtgaatgtttaaaccgcagccaccatgagcaccgccgtgctggaaaatcctggcttgggcaggaaactctctgactttggacaggtaagcctgttgggcttccactgctaggagagaattggttccccacatgtgaaagcagtctgggaaatgctggtatttccagtctcctaaggctactaagaaatatgactttatttagaggcgaggaaaatgcccaggaagtcaactgatgagtctagtcttaacaagttgaggatacagaaagttggggatctgagctgctaccaacatctgtgtgtctttgggtggctcattggtatcctctgcctattggctttatcttctgtacactgaaaggaaatggctggtccttagtcacctacccaggtcttggatccatagcctacggatgtcccatttttattgctttttatattttgtctcccagtgtctttttgaggattttttttttttttttgcatcacttgctcttcctctaagaatctcctgacttcttgtacatgtgtctgatggtcagaattttagcactgaagtatgggcgtatttatcataattcaggtttatatcctttcagatatgggctagggtctggtattagggtgctcattaaaaaatgttgatttttgtcagtgtctagtgacatcaatgcataatttaaggttctataaattgaaagctaacccaggagtgactcatcctctcattgttttcaacttacttatttctgatcacactgacttccctgtggaatacacgtggttcactgtgttccaaagcttaacgagcagaaaaaggttatgctcgtctcttcttgagaggttttaagagaataattgctaagctgtgaaaaacattttaaccaagtgatctaattatgtaggaaacaagctatattgaagacaactgcaatcaaaacggcgccatcagcctgatcttcagcctgaaagaagaagtgggcgccctggccaaggtgctgagactgttcgaagagaacgacgtgaacctgacacacatcgagagcagacccagcagactgaagaaggacgagtacgagttcttcacccacctggacaagcggagcctgcctgctctgaccaacatcatcaagatcctgcggcacgacatcggcgccacagtgcacgaactgagccgggacaagaaaaaggacaccgtgccatggttccccagaaccatccaagagctggacagattcgccaaccagatcctgagctatggcgccgagctggacgctgatcaccctggctttaaggaccccgtgtaccgggccagaagaaagcagtttgccgatatcgcctacaactaccggcacggccagcctattcctcgggtcgagtacatggaagaggaaaagaaaacctggggcaccgtgttcaagaccctgaagtccctgtacaagacccacgcctgctacgagtacaaccacatcttcccactgctcgaaaagtactgcggcttccacgaggacaatatccctcagcttgaggacgtgtcccagttcctgcagacctgcaccggctttagactgaggccagttgccggactgctgagcagcagagattttctcggcggcctggccttcagagtgttccactgtacccagtacatcagacacggcagcaagcccatgtacacccctgagcctgatatctgccacgagctgctgggacatgtgcccctgttcagcgatagaagcttcgcccagttcagccaagagatcggactggcttctctgggagcccctgacgagtacattgagaagctggccaccatctactggttcaccgtggaattcggcctgtgcaagcagggcgacagcatcaaagcttatggcgctggcctgctgtctagcttcggcgagctgcagtactgtctgagcgagaagcctaagctgctgcccctggaactggaaaagaccgccatccagaactacaccgtgaccgagttccagcctctgtactacgtggccgagagcttcaacgacgccaaagaaaaagtgcggaacttcgccgccaccattcctcggcctttcagcgtcagatacgacccctacacacagcggatcgaggtgctggacaacacacagcagctgaaaattctggccgactccatcaacagcgagatcggcatcctgtgcagcgccctgcagaaaatcaagtgatagttaattaagagcatcttaccgccatttattcccatatttgttctgtttttcttgatttgggtatacatttaaatgttaataaaacaaaatggtggggcaatcatttacatttttagggatatgtaattactagttcaggtgtattgccacaagacaaacatgttaagaaactttcccgttatttacgctctgttcctgttaatcaacctctggattacaaaatttgtgaaagattgactgatattcttaactatgttgctccttttacgctgtgtggatatgctgctttatagcctctgtatctagctattgcttcccgtacggctttcgttttctcctccttgtataaatcctggttgctgtctcttttagaggagttgtggcccgttgtccgtcaacgtggcgtggtgtgctctgtgtttgctgacgcaacccccactggctggggcattgccaccacctgtcaactcctttctgggactttcgctttccccctcccgatcgccacggcagaactcatcgccgcctgccttgcccgctgctggacaggggctaggttgctgggcactgataattccgtggtgttgtctgtgccttctagttgccagccatctgttgtttgcccctcccccgtgccttccttgaccctggaaggtgccactcccactgtcctttcctaataaaatgaggaaattgcatcgcattgtctgagtaggtgtcattctattctggggggtggggtggggcaggacagcaagggggaggattgggaagacaatagcaggcatgctggggatgcggtgggctctatggctctagagcatggctacgtagataagtagcatggcgggttaatcattaactacacctgcaggaggaacccctagtgatggagttggccactccctctctgcgcgctcgctcgctcactgaggccgggcgaccaaaggtcgcccgacgcccgggcggcctcagtgagcgagcgagcgcgcagctgcctgcagg

SEQ ID NO: 547 - DNA, 4388 bp, Artificial Sequence
  Description of Artificial Sequence: Synthetic polynucleotide
cctgcaggcagctgcgcgctcgctcgctcactgaggccgcccgggcaaagcccgggcgtcgggcgacctttggtcgcccggcctcagtgagcgagcgagcgcgcagagagggagtggccaactccatcactaggggttccttgtagttaatgattaacccgccatgctacttatcgcggccgcaggctcagaggcacacaggagtttctgggctcaccctgcccccttccaacccctcagttcccatcctccagcagctgtttgtgtgctgcctctgaagtccacactgaacaaacttcagcctactcatgtccctaaaatgggcaaacattgcaagcagcaaacagcaaacacacagccctccctgcctgctgaccttggagctggggcagaggtcagagacctctctgggcccatgccacctccaacatccactcgaccccttggaatttcggtggagaggagcagaggttgtcctggcgtggtttaggtagtgtgagagggcttaagagcaacagatcattctatgggttaatcattaacaacaggttaggcttgtactttggtacattggctcctagttaatcattaacttagcaatgtgcttgtactttggtacatagttacctagttaatcattaacaaacagtatggcttgtactttggtacaagcaacagatcattctatgggcgagaacttgtgcctccccgtgttcctgctctttgtccctctgtcctacttagactaatatttgccttgggtactgcaaacaggaaatgggggagggacaggagtagggcggagggtagcaattggattctgcagtgagagcagagggccagctaagtggtactctcccagagactgtctgactcacgccaccccctccaccttggacacaggacgctgtggtttctgagccaggtacaatgactcctttcggtaagtgcagtggaagctgtacactgcccaggcaaagcgtccgggcagcgtaggcgggcgactcagatcccagccagtggacttagcccctgtttgctcctccgataactggggtgaccttggttaatattcaccagcagcctcccccgttgcccctctggatccactgcttaaatacggacgaggacagggccctgtctcctcagcttcaggcaccaccactgacctgggacagtgaatgtttaaaccgcagccaccatgagcaccgccgtgctggaaaatcctggcttgggcaggaaactctctgactttggacaggtaagcctgttgggcttccactgctaggagagaattggttccccacatgtgaaagcagtctgggaaatgctggtatttccagtctcctaaggctactaagaaatatgactttatttagaggcgaggaaaatgcccaggaagtcaactgatgagtctagtcttaacaagttgaggatacagaaagttggggatctgagctgctaccaacatctgtgtgtctttgggtggctcattggtatcctctgcctattggctttatcttctgtacactgaaaggaaatggctggtccttagtcacctacccaggtcttggatccatagcctacggatgtcccatttttattgctttttatattttgtctcccagtgtctttttgaggattttttttttttttttgcatcacttgctcttcctctaagaatctcctgacttcttgtacatgtgtctgatggtcagaattttagcactgaagtatgggcgtatttatcataattcaggtttatatcctttcagatatgggctagggtctggtattagggtgctcattaaaaaatgttgatttttgtcagtgtctagtgacatcaatgcataatttaaggttctataaattgaaagctaacccaggagtgactcatcctctcattgttttcaacttacttatttctgatcacactgacttccctgtggaatacacgtggttcactgtgttccaaagcttaacgagcagaaaaaggttatgctcgtctcttcttgagaggttttaagagaataattgctaagctgtgaaaaacattttaaccaagtgatctaattatgtaggaaacaagctatattgaagacaactgcaatcaaaacggcgccatcagcctgatcttcagcctgaaagaagaagtgggcgccctggccaaggtgctgagactgttcgaagagaacgacgtgaacctgacacacatcgagagcagacccagcagactgaagaaggacgagtacgagttcttcacccacctggacaagcggagcctgcctgctctgaccaacatcatcaagatcctgcggcacgacatcggcgccacagtgcacgaactgagccgggacaagaaaaaggacaccgtgccatggttccccagaaccatccaagagctggacagattcgccaaccagatcctgagctatggcgccgagctggacgctgatcaccctggctttaaggaccccgtgtaccgggccagaagaaagcagtttgccgatatcgcctacaactaccggcacggccagcctattcctcgggtcgagtacatggaagaggaaaagaaaacctggggcaccgtgttcaagaccctgaagtccctgtacaagacccacgcctgctacgagtacaaccacatcttcccactgctcgaaaagtactgcggcttccacgaggacaatatccctcagcttgaggacgtgtcccagttcctgcagacctgcaccggctttagactgaggccagttgccggactgctgagcagcagagattttctcggcggcctggccttcagagtgttccactgtacccagtacatcagacacggcagcaagcccatgtacacccctgagcctgatatctgccacgagctgctgggacatgtgcccctgttcagcgatagaagcttcgcccagttcagccaagagatcggactggcttctctgggagcccctgacgagtacattgagaagctggccaccatctactggttcaccgtggaattcggcctgtgcaagcagggcgacagcatcaaagcttatggcgctggcctgctgtctagcttcggcgagctgcagtactgtctgagcgagaagcctaagctgctgcccctggaactggaaaagaccgccatccagaactacaccgtgaccgagttccagcctctgtactacgtggccgagagcttcaacgacgccaaagaaaaagtgcggaacttcgccgccaccattcctcggcctttcagcgtcagatacgacccctacacacagcggatcgaggtgctggacaacacacagcagctgaaaattctggccgactccatcaacagcgagatcggcatcctgtgcagcgccctgcagaaaatcaagtgatagttaattaagagcatcttaccgccatttattcccatatttgttctgtttttcttgatttgggtatacatttaaatgttaataaaacaaaatggtggggcaatcatttacatttttagggatatgtaattactagttcaggtgtattgccacaagacaaacatgttaagaaactttcccgttatttacgctctgttcctgttaatcaacctctggattacaaaatttgtgaaagattgactgatattcttaactatgttgctccttttacgctgtgtggatatgctgctttatagcctctgtatctagctattgcttcccgtacggctttcgttttctcctccttgtataaatcctggttgctgtctcttttagaggagttgtggcccgttgtccgtcaacgtggcgtggtgtgctctgtgtttgctgacgcaacccccactggctggggcattgccaccacctgtcaactcctttctgggactttcgctttccccctcccgatcgccacggcagaactcatcgccgcctgccttgcccgctgctggacaggggctaggttgctgggcactgataattccgtggtgttgtctgtgccttctagttgccagccatctgttgtttgcccctcccccgtgccttccttgaccctggaaggtgccactcccactgtcctttcctaataaaatgaggaaattgcatcgcattgtctgagtaggtgtcattctattctggggggtggggtggggcaggacagcaagggggaggattgggaagacaatagcaggcatgctggggatgcggtgggctctatggctctagagcatggctacgtagataagtagcatggcgggttaatcattaactacacctgcaggaggaacccctagtgatggagttggccactccctctctgcgcgctcgctcgctcactgaggccgggcgaccaaaggtcgcccgacgcccgggcggcctcagtgagcgagcgagcgcgcagctgcctgcagg

SEQ ID NO: 548 - DNA, 3972 bp, Artificial Sequence
  Description of Artificial Sequence: Synthetic polynucleotide
cctgcaggcagctgcgcgctcgctcgctcactgaggccgcccgggcaaagcccgggcgtcgggcgacctttggtcgcccggcctcagtgagcgagcgagcgcgcagagagggagtggccaactccatcactaggggttccttgtagttaatgattaacccgccatgctacttatcgcggccgcaacaggttagtttgactagcgttaatcattaacgttaatcattaacgttaatcattaacgttaatcattaacgttaatcattaacatcgatgcgagaacttgtgcctccccgtgttcctgctctttgtccctctgtcctacttagactaatatttgccttgggtactgcaaacaggaaatgggggagggacaggagtagggcggagggtagcccggggattctgcagtgagagcagagggccagctaagtggtactctcccagagactgtctgactcacgccaccccctccaccttggacacaggacgctgtggtttctgagccaggtacaatgactcctttcggtaagtgcagtggaagctgtacactgcccaggcaaagcgtccgggcagcgtaggcgggcgactcagatcccagccagtggacttagcccctgtttgctcctccgataactggggtgaccttggttaatattcaccagcagcctcccccgttgcccctctggatccactgcttaaatacggacgaggacagggccctgtctcctcagcttcaggcaccaccactgacctgggacagtgaatgtttaaaccgcagccaccatgagcaccgccgtgctggaaaatcctggcttgggcaggaaactctctgactttggacaggtaagcctgttgggcttccactgctaggagagaattggttccccacatgtgaaagcagtctgggaaatgctggtatttccagtctcctaaggctactaagaaatatgactttatttagaggcgaggaaaatgcccaggaagtcaactgatgagtctagtcttaacaagttgaggatacagaaagttggggatctgagctgctaccaacatctgtgtgtctttgggtggctcattggtatcctctgcctattggctttatcttctgtacactgaaaggaaatggctggtccttagtcacctacccaggtcttggatccatagcctacggatgtcccatttttattgctttttatattttgtctcccagtgtctttttgaggattttttttttttttttgcatcacttgctcttcctctaagaatctcctgacttcttgtacatgtgtctgatggtcagaattttagcactgaagtatgggcgtatttatcataattcaggtttatatcctttcagatatgggctagggtctggtattagggtgctcattaaaaaatgttgatttttgtcagtgtctagtgacatcaatgcataatttaaggttctataaattgaaagctaacccaggagtgactcatcctctcattgttttcaacttacttatttctgatcacactgacttccctgtggaatacacgtggttcactgtgttccaaagcttaacgagcagaaaaaggttatgctcgtctcttcttgagaggttttaagagaataattgctaagctgtgaaaaacattttaaccaagtgatctaattatgtaggaaacaagctatattgaagacaactgcaatcaaaacggcgccatcagcctgatcttcagcctgaaagaagaagtgggcgccctggccaaggtgctgagactgttcgaagagaacgacgtgaacctgacacacatcgagagcagacccagcagactgaagaaggacgagtacgagttcttcacccacctggacaagcggagcctgcctgctctgaccaacatcatcaagatcctgcggcacgacatcggcgccacagtgcacgaactgagccgggacaagaaaaaggacaccgtgccatggttccccagaaccatccaagagctggacagattcgccaaccagatcctgagctatggcgccgagctggacgctgatcaccctggctttaaggaccccgtgtaccgggccagaagaaagcagtttgccgatatcgcctacaactaccggcacggccagcctattcctcgggtcgagtacatggaagaggaaaagaaaacctggggcaccgtgttcaagaccctgaagtccctgtacaagacccacgcctgctacgagtacaaccacatcttcccactgctcgaaaagtactgcggcttccacgaggacaatatccctcagcttgaggacgtgtcccagttcctgcagacctgcaccggctttagactgaggccagttgccggactgctgagcagcagagattttctcggcggcctggccttcagagtgttccactgtacccagtacatcagacacggcagcaagcccatgtacacccctgagcctgatatctgccacgagctgctgggacatgtgcccctgttcagcgatagaagcttcgcccagttcagccaagagatcggactggcttctctgggagcccctgacgagtacattgagaagctggccaccatctactggttcaccgtggaattcggcctgtgcaagcagggcgacagcatcaaagcttatggcgctggcctgctgtctagcttcggcgagctgcagtactgtctgagcgagaagcctaagctgctgcccctggaactggaaaagaccgccatccagaactacaccgtgaccgagttccagcctctgtactacgtggccgagagcttcaacgacgccaaagaaaaagtgcggaacttcgccgccaccattcctcggcctttcagcgtcagatacgacccctacacacagcggatcgaggtgctggacaacacacagcagctgaaaattctggccgactccatcaacagcgagatcggcatcctgtgcagcgccctgcagaaaatcaagtgatagttaattaagagcatcttaccgccatttattcccatatttgttctgtttttcttgatttgggtatacatttaaatgttaataaaacaaaatggtggggcaatcatttacatttttagggatatgtaattactagttcaggtgtattgccacaagacaaacatgttaagaaactttcccgttatttacgctctgttcctgttaatcaacctctggattacaaaatttgtgaaagattgactgatattcttaactatgttgctccttttacgctgtgtggatatgctgctttatagcctctgtatctagctattgcttcccgtacggctttcgttttctcctccttgtataaatcctggttgctgtctcttttagaggagttgtggcccgttgtccgtcaacgtggcgtggtgtgctctgtgtttgctgacgcaacccccactggctggggcattgccaccacctgtcaactcctttctgggactttcgctttccccctcccgatcgccacggcagaactcatcgccgcctgccttgcccgctgctggacaggggctaggttgctgggcactgataattccgtggtgttgtctgtgccttctagttgccagccatctgttgtttgcccctcccccgtgccttccttgaccctggaaggtgccactcccactgtcctttcctaataaaatgaggaaattgcatcgcattgtctgagtaggtgtcattctattctggggggtggggtggggcaggacagcaagggggaggattgggaagacaatagcaggcatgctggggatgcggtgggctctatggctctagagcatggctacgtagataagtagcatggcgggttaatcattaactacacctgcaggaggaacccctagtgatggagttggccactccctctctgcgcgctcgctcgctcactgaggccgggcgaccaaaggtcgcccgacgcccgggcggcctcagtgagcgagcgagcgcgcagctgcctgcagg

SEQ ID NO: 549 - DNA, 4016 bp, Artificial Sequence
  Description of Artificial Sequence: Synthetic polynucleotide
cctgcaggcagctgcgcgctcgctcgctcactgaggccgcccgggcaaagcccgggcgtcgggcgacctttggtcgcccggcctcagtgagcgagcgagcgcgcagagagggagtggccaactccatcactaggggttccttgtagttaatgattaacccgccatgctacttatcgcggccgcagcaacagatcattctatgggttaatcattaacaacaggttaggttaatcattaacttggctcctagttaatcattaacaaacagtatggttaatcattaacaaattctggggttaatcattaactagttacctagcgagaacttgtgcctccccgtgttcctgctctttgtccctctgtcctacttagactaatatttgccttgggtactgcaaacaggaaatgggggagggacaggagtagggcggagggtagcaattggattctgcagtgagagcagagggccagctaagtggtactctcccagagactgtctgactcacgccaccccctccaccttggacacaggacgctgtggtttctgagccaggtacaatgactcctttcggtaagtgcagtggaagctgtacactgcccaggcaaagcgtccgggcagcgtaggcgggcgactcagatcccagccagtggacttagcccctgtttgctcctccgataactggggtgaccttggttaatattcaccagcagcctcccccgttgcccctctggatccactgcttaaatacggacgaggacagggccctgtctcctcagcttcaggcaccaccactgacctgggacagtgaatgtttaaaccgcagccaccatgagcaccgccgtgctggaaaatcctggcttgggcaggaaactctctgactttggacaggtaagcctgttgggcttccactgctaggagagaattggttccccacatgtgaaagcagtctgggaaatgctggtatttccagtctcctaaggctactaagaaatatgactttatttagaggcgaggaaaatgcccaggaagtcaactgatgagtctagtcttaacaagttgaggatacagaaagttggggatctgagctgctaccaacatctgtgtgtctttgggtggctcattggtatcctctgcctattggctttatcttctgtacactgaaaggaaatggctggtccttagtcacctacccaggtcttggatccatagcctacggatgtcccatttttattgctttttatattttgtctcccagtgtctttttgaggattttttttttttttttgcatcacttgctcttcctctaagaatctcctgacttcttgtacatgtgtctgatggtcagaattttagcactgaagtatgggcgtatttatcataattcaggtttatatcctttcagatatgggctagggtctggtattagggtgctcattaaaaaatgttgatttttgtcagtgtctagtgacatcaatgcataatttaaggttctataaattgaaagctaacccaggagtgactcatcctctcattgttttcaacttacttatttctgatcacactgacttccctgtggaatacacgtggttcactgtgttccaaagcttaacgagcagaaaaaggttatgctcgtctcttcttgagaggttttaagagaataattgctaagctgtgaaaaacattttaaccaagtgatctaattatgtaggaaacaagctatattgaagacaactgcaatcaaaacggcgccatcagcctgatcttcagcctgaaagaagaagtgggcgccctggccaaggtgctgagactgttcgaagagaacgacgtgaacctgacacacatcgagagcagacccagcagactgaagaaggacgagtacgagttcttcacccacctggacaagcggagcctgcctgctctgaccaacatcatcaagatcctgcggcacgacatcggcgccacagtgcacgaactgagccgggacaagaaaaaggacaccgtgccatggttccccagaaccatccaagagctggacagattcgccaaccagatcctgagctatggcgccgagctggacgctgatcaccctggctttaaggaccccgtgtaccgggccagaagaaagcagtttgccgatatcgcctacaactaccggcacggccagcctattcctcgggtcgagtacatggaagaggaaaagaaaacctggggcaccgtgttcaagaccctgaagtccctgtacaagacccacgcctgctacgagtacaaccacatcttcccactgctcgaaaagtactgcggcttccacgaggacaatatccctcagcttgaggacgtgtcccagttcctgcagacctgcaccggctttagactgaggccagttgccggactgctgagcagcagagattttctcggcggcctggccttcagagtgttccactgtacccagtacatcagacacggcagcaagcccatgtacacccctgagcctgatatctgccacgagctgctgggacatgtgcccctgttcagcgatagaagcttcgcccagttcagccaagagatcggactggcttctctgggagcccctgacgagtacattgagaagctggccaccatctactggttcaccgtggaattcggcctgtgcaagcagggcgacagcatcaaagcttatggcgctggcctgctgtctagcttcggcgagctgcagtactgtctgagcgagaagcctaagctgctgcccctggaactggaaaagaccgccatccagaactacaccgtgaccgagttccagcctctgtactacgtggccgagagcttcaacgacgccaaagaaaaagtgcggaacttcgccgccaccattcctcggcctttcagcgtcagatacgacccctacacacagcggatcgaggtgctggacaacacacagcagctgaaaattctggccgactccatcaacagcgagatcggcatcctgtgcagcgccctgcagaaaatcaagtgatagttaattaagagcatcttaccgccatttattcccatatttgttctgtttttcttgatttgggtatacatttaaatgttaataaaacaaaatggtggggcaatcatttacatttttagggatatgtaattactagttcaggtgtattgccacaagacaaacatgttaagaaactttcccgttatttacgctctgttcctgttaatcaacctctggattacaaaatttgtgaaagattgactgatattcttaactatgttgctccttttacgctgtgtggatatgctgctttatagcctctgtatctagctattgcttcccgtacggctttcgttttctcctccttgtataaatcctggttgctgtctcttttagaggagttgtggcccgttgtccgtcaacgtggcgtggtgtgctctgtgtttgctgacgcaacccccactggctggggcattgccaccacctgtcaactcctttctgggactttcgctttccccctcccgatcgccacggcagaactcatcgccgcctgccttgcccgctgctggacaggggctaggttgctgggcactgataattccgtggtgttgtctgtgccttctagttgccagccatctgttgtttgcccctcccccgtgccttccttgaccctggaaggtgccactcccactgtcctttcctaataaaatgaggaaattgcatcgcattgtctgagtaggtgtcattctattctggggggtggggtggggcaggacagcaagggggaggattgggaagacaatagcaggcatgctggggatgcggtgggctctatggctctagagcatggctacgtagataagtagcatggcgggttaatcattaactacacctgcaggaggaacccctagtgatggagttggccactccctctctgcgcgctcgctcgctcactgaggccgggcgaccaaaggtcgcccgacgcccgggcggcctcagtgagcgagcgagcgcgcagctgcctgcagg

SEQ ID NO: 550 - DNA, 4343 bp, Artificial Sequence
  Description of Artificial Sequence: Synthetic polynucleotide
cctgcaggcagctgcgcgctcgctcgctcactgaggccgcccgggcaaagcccgggcgtcgggcgacctttggtcgcccggcctcagtgagcgagcgagcgcgcagagagggagtggccaactccatcactaggggttccttgtagttaatgattaacccgccatgctacttatcgcggccgcaggctcagaggcacacaggagtttctgggctcaccctgcccccttccaacccctcagttcccatcctccagcagctgtttgtgtgctgcctctgaagtccacactgaacaaacttcagcctactcatgtccctaaaatgggcaaacattgcaagcagcaaacagcaaacacacagccctccctgcctgctgaccttggagctggggcagaggtcagagacctctctgggcccatgccacctccaacatccactcgaccccttggaatttcggtggagaggagcagaggttgtcctggcgtggtttaggtagtgtgagagggcttaagagcaacagatcattctatgggttaatcattaacaacaggttaggttaatcattaacttggctcctagttaatcattaacaaacagtatggttaatcattaacaaattctggggttaatcattaactagttacctagcgagaacttgtgcctccccgtgttcctgctctttgtccctctgtcctacttagactaatatttgccttgggtactgcaaacaggaaatgggggagggacaggagtagggcggagggtagcaattggattctgcagtgagagcagagggccagctaagtggtactctcccagagactgtctgactcacgccaccccctccaccttggacacaggacgctgtggtttctgagccaggtacaatgactcctttcggtaagtgcagtggaagctgtacactgcccaggcaaagcgtccgggcagcgtaggcgggcgactcagatcccagccagtggacttagcccctgtttgctcctccgataactggggtgaccttggttaatattcaccagcagcctcccccgttgcccctctggatccactgcttaaatacggacgaggacagggccctgtctcctcagcttcaggcaccaccactgacctgggacagtgaatgtttaaaccgcagccaccatgagcaccgccgtgctggaaaatcctggcttgggcaggaaactctctgactttggacaggtaagcctgttgggcttccactgctaggagagaattggttccccacatgtgaaagcagtctgggaaatgctggtatttccagtctcctaaggctactaagaaatatgactttatttagaggcgaggaaaatgcccaggaagtcaactgatgagtctagtcttaacaagttgaggatacagaaagttggggatctgagctgctaccaacatctgtgtgtctttgggtggctcattggtatcctctgcctattggctttatcttctgtacactgaaaggaaatggctggtccttagtcacctacccaggtcttggatccatagcctacggatgtcccatttttattgctttttatattttgtctcccagtgtctttttgaggattttttttttttttttgcatcacttgctcttcctctaagaatctcctgacttcttgtacatgtgtctgatggtcagaattttagcactgaagtatgggcgtatttatcataattcaggtttatatcctttcagatatgggctagggtctggtattagggtgctcattaaaaaatgttgatttttgtcagtgtctagtgacatcaatgcataatttaaggttctataaattgaaagctaacccaggagtgactcatcctctcattgttttcaacttacttatttctgatcacactgacttccctgtggaatacacgtggttcactgtgttccaaagcttaacgagcagaaaaaggttatgctcgtctcttcttgagaggttttaagagaataattgctaagctgtgaaaaacattttaaccaagtgatctaattatgtaggaaacaagctatattgaagacaactgcaatcaaaacggcgccatcagcctgatcttcagcctgaaagaagaagtgggcgccctggccaaggtgctgagactgttcgaagagaacgacgtgaacctgacacacatcgagagcagacccagcagactgaagaaggacgagtacgagttcttcacccacctggacaagcggagcctgcctgctctgaccaacatcatcaagatcctgcggcacgacatcggcgccacagtgcacgaactgagccgggacaagaaaaaggacaccgtgccatggttccccagaaccatccaagagctggacagattcgccaaccagatcctgagctatggcgccgagctggacgctgatcaccctggctttaaggaccccgtgtaccgggccagaagaaagcagtttgccgatatcgcctacaactaccggcacggccagcctattcctcgggtcgagtacatggaagaggaaaagaaaacctggggcaccgtgttcaagaccctgaagtccctgtacaagacccacgcctgctacgagtacaaccacatcttcccactgctcgaaaagtactgcggcttccacgaggacaatatccctcagcttgaggacgtgtcccagttcctgcagacctgcaccggctttagactgaggccagttgccggactgctgagcagcagagattttctcggcggcctggccttcagagtgttccactgtacccagtacatcagacacggcagcaagcccatgtacacccctgagcctgatatctgccacgagctgctgggacatgtgcccctgttcagcgatagaagcttcgcccagttcagccaagagatcggactggcttctctgggagcccctgacgagtacattgagaagctggccaccatctactggttcaccgtggaattcggcctgtgcaagcagggcgacagcatcaaagcttatggcgctggcctgctgtctagcttcggcgagctgcagtactgtctgagcgagaagcctaagctgctgcccctggaactggaaaagaccgccatccagaactacaccgtgaccgagttccagcctctgtactacgtggccgagagcttcaacgacgccaaagaaaaagtgcggaacttcgccgccaccattcctcggcctttcagcgtcagatacgacccctacacacagcggatcgaggtgctggacaacacacagcagctgaaaattctggccgactccatcaacagcgagatcggcatcctgtgcagcgccctgcagaaaatcaagtgatagttaattaagagcatcttaccgccatttattcccatatttgttctgtttttcttgatttgggtatacatttaaatgttaataaaacaaaatggtggggcaatcatttacatttttagggatatgtaattactagttcaggtgtattgccacaagacaaacatgttaagaaactttcccgttatttacgctctgttcctgttaatcaacctctggattacaaaatttgtgaaagattgactgatattcttaactatgttgctccttttacgctgtgtggatatgctgctttatagcctctgtatctagctattgcttcccgtacggctttcgttttctcctccttgtataaatcctggttgctgtctcttttagaggagttgtggcccgttgtccgtcaacgtggcgtggtgtgctctgtgtttgctgacgcaacccccactggctggggcattgccaccacctgtcaactcctttctgggactttcgctttccccctcccgatcgccacggcagaactcatcgccgcctgccttgcccgctgctggacaggggctaggttgctgggcactgataattccgtggtgttgtctgtgccttctagttgccagccatctgttgtttgcccctcccccgtgccttccttgaccctggaaggtgccactcccactgtcctttcctaataaaatgaggaaattgcatcgcattgtctgagtaggtgtcattctattctggggggtggggtggggcaggacagcaagggggaggattgggaagacaatagcaggcatgctggggatgcggtgggctctatggctctagagcatggctacgtagataagtagcatggcgggttaatcattaactacacctgcaggaggaacccctagtgatggagttggccactccctctctgcgcgctcgctcgctcactgaggccgggcgaccaaaggtcgcccgacgcccgggcggcctcagtgagcgagcgagcgcgcagctgcctgcagg

SEQ ID NO: 551 - DNA, 3916 bp, Artificial Sequence
  Description of Artificial Sequence: Synthetic polynucleotide
cctgcaggcagctgcgcgctcgctcgctcactgaggccgcccgggcaaagcccgggcgtcgggcgacctttggtcgcccggcctcagtgagcgagcgagcgcgcagagagggagtggccaactccatcactaggggttccttgtagttaatgattaacccgccatgctacttatcgcggccgccgggggaggctgctggtgaatattaaccaaggtcaccccagttatcggaggagcaaacaggggctaagtccacacgcgtggtaccgtctgtctgcacatttcgtagagcgagtgttccgatactctaatctccctaggcaaggttcatatttgtgtaggttacttattctccttttgttgactaagtcaataatcagaatcagcaggtttggagtcagcttggcagggatcagcagcctgggttggaaggagggggtataaaagccccttcaccaggagaagccgtcacacagatccacaagctcctgaagaggtaagggtttaagggatggttggttggtggggtattaatgtttaattacctggagcacctgcctgaaatcactttttttcaggttggtttaaaccgcagccaccatgagcaccgccgtgctggaaaatcctggcttgggcaggaaactctctgactttggacaggtgagccacggcagcctgagctgctcagttaggggaatttgggcctccagagaaagagatccgaagactgctggtgcttcctggtttcataagctcagtaagaagtctgaattcgttggaagctgatgatagaagaaagagttcatgcttgctttgtccatggaggtttaacaggaatgaattgctaaactgtggaaaatgttttaaacaaatgcatcttatcctgtaggaaacaagctatattgaagacaactgcaatcaaaacggcgccatcagcctgatcttcagcctgaaagaagaagtgggcgccctggccaaggtgctgagactgttcgaagagaacgacgtgaacctgacacacatcgagagcagacccagcagactgaagaaggacgagtacgagttcttcacccacctggacaagcggagcctgcctgctctgaccaacatcatcaagatcctgcggcacgacatcggcgccacagtgcacgaactgagccgggacaagaaaaaggacaccgtgccatggttccccagaaccatccaagagctggacagattcgccaaccagatcctgagctatggcgccgagctggacgctgatcaccctggctttaaggaccccgtgtaccgggccagaagaaagcagtttgccgatatcgcctacaactaccggcacggccagcctattcctcgggtcgagtacatggaagaggaaaagaaaacctggggcaccgtgttcaagaccctgaagtccctgtacaagacccacgcctgctacgagtacaaccacatcttcccactgctcgaaaagtactgcggcttccacgaggacaatatccctcagcttgaggacgtgtcccagttcctgcagacctgcaccggctttagactgaggccagttgccggactgctgagcagcagagattttctcggcggcctggccttcagagtgttccactgtacccagtacatcagacacggcagcaagcccatgtacacccctgagcctgatatctgccacgagctgctgggacatgtgcccctgttcagcgatagaagcttcgcccagttcagccaagagatcggactggcttctctgggagcccctgacgagtacattgagaagctggccaccatctactggttcaccgtggaattcggcctgtgcaagcagggcgacagcatcaaagcttatggcgctggcctgctgtctagcttcggcgagctgcagtactgtctgagcgagaagcctaagctgctgcccctggaactggaaaagaccgccatccagaactacaccgtgaccgagttccagcctctgtactacgtggccgagagcttcaacgacgccaaagaaaaagtgcggaacttcgccgccaccattcctcggcctttcagcgtcagatacgacccctacacacagcggatcgaggtgctggacaacacacagcagctgaaaattctggccgactccatcaacagcgagatcggcatcctgtgcagcgccctgcagaaaatcaagtgatagttaattaagagcatcttaccgccatttattcccatatttgttctgtttttcttgatttgggtatacatttaaatgttaataaaacaaaatggtggggcaatcatttacatttttagggatatgtaattactagttcaggtgtattgccacaagacaaacatgttaagaaactttcccgttatttacgctctgttcctgttaatcaacctctggattacaaaatttgtgaaagattgactgatattcttaactatgttgctccttttacgctgtgtggatatgctgctttatagcctctgtatctagctattgcttcccgtacggctttcgttttctcctccttgtataaatcctggttgctgtctcttttagaggagttgtggcccgttgtccgtcaacgtggcgtggtgtgctctgtgtttgctgacgcaacccccactggctggggcattgccaccacctgtcaactcctttctgggactttcgctttccccctcccgatcgccacggcagaactcatcgccgcctgccttgcccgctgctggacaggggctaggttgctgggcactgataattccgtggtgttgtctgtgccttctagttgccagccatctgttgtttgcccctcccccgtgccttccttgaccctggaaggtgccactcccactgtcctttcctaataaaatgaggaaattgcatcgcattgtctgagtaggtgtcattctattctggggggtggggtggggcaggacagcaagggggaggattgggaagacaatagcaggcatgctggggatgcggtgggctctatggccttaagaacaggttagtttgactagcgggaggtggtccctgcagttacgccaatgataacccccgccagaaaaatcttagtagccttccctttttgttttccgtgccccaactcggcggattgactcggccccttccggaaacacccgaatcaacttctagtcaaattattgttcacgccgcaatgacccacccctggcccgcgtctgtggaactgacccctggtgtacaggagagttcgctgctgaaagtggtcccaaaggggtactagtttttaagctcccaactccccctcccccagcgtctggaggattccacaccctcgcaccgcaggggcgaggaagtgggcggagtccggttttggcgccagccgctgaggctgccaagcagaaaagccaccgctgaggagactccggtcactgtcctcgccccgcctcccccttccctccccttggggaccaccgggcgccacgccgcgaacgttaagtgccgcggtcgtcggcgcctccgccctcccccttgggccccaattcccagcgggcgcggcgcgcggcccctccccccgccgggcgcgcgcccgctgccccgcccttcgtggccgcccggcgtgggcggtgccacccctccccccggcggccccgcgcgcagctcccggctccctcccccttcggatgtggcttgagctgtaggcgcggagggccagagacttcacaacctagtttctagagcatggctacgtagataagtagcatggcgggttaatcattaactacacctgcaggaggaacccctagtgatggagttggccactccctctctgcgcgctcgctcgctcactgaggccgggcgaccaaaggtcgcccgacgcccgggcggcctcagtgagcgagcgagcgcgcagctgcctgcagg

SEQ ID NO: 552 - DNA, 3916 bp, Artificial Sequence
  Description of Artificial Sequence: Synthetic polynucleotide
cctgcaggcagctgcgcgctcgctcgctcactgaggccgcccgggcaaagcccgggcgtcgggcgacctttggtcgcccggcctcagtgagcgagcgagcgcgcagagagggagtggccaactccatcactaggggttccttgtagttaatgattaacccgccatgctacttatcgcggccgccgggggaggctgctggtgaatattaaccaaggtcaccccagttatcggaggagcaaacaggggctaagtccacacgcgtggtaccgtctgtctgcacatttcgtagagcgagtgttccgatactctaatctccctaggcaaggttcatatttgtgtaggttacttattctccttttgttgactaagtcaataatcagaatcagcaggtttggagtcagcttggcagggatcagcagcctgggttggaaggagggggtataaaagccccttcaccaggagaagccgtcacacagatccacaagctcctgaagaggtaagggtttaagggatggttggttggtggggtattaatgtttaattacctggagcacctgcctgaaatcactttttttcaggttggtttaaaccgcagccaccatgagcaccgccgtgctggaaaatcctggcttgggcaggaaactctctgactttggacaggtgagccacggcagcctgagctgctcagttaggggaatttgggcctccagagaaagagatccgaagactgctggtgcttcctggtttcataagctcagtaagaagtctgaattcgttggaagctgatgatagaagaaagagttcatgcttgctttgtccatggaggtttaacaggaatgaattgctaaactgtggaaaatgttttaaacaaatgcatcttatcctgtaggaaacaagctatattgaagacaactgcaatcaaaacggcgccatcagcctgatcttcagcctgaaagaagaagtgggcgccctggccaaggtgctgagactgttcgaagagaacgacgtgaacctgacacacatcgagagcagacccagcagactgaagaaggacgagtacgagttcttcacccacctggacaagcggagcctgcctgctctgaccaacatcatcaagatcctgcggcacgacatcggcgccacagtgcacgaactgagccgggacaagaaaaaggacaccgtgccatggttccccagaaccatccaagagctggacagattcgccaaccagatcctgagctatggcgccgagctggacgctgatcaccctggctttaaggaccccgtgtaccgggccagaagaaagcagtttgccgatatcgcctacaactaccggcacggccagcctattcctcgggtcgagtacatggaagaggaaaagaaaacctggggcaccgtgttcaagaccctgaagtccctgtacaagacccacgcctgctacgagtacaaccacatcttcccactgctcgaaaagtactgcggcttccacgaggacaatatccctcagcttgaggacgtgtcccagttcctgcagacctgcaccggctttagactgaggccagttgccggactgctgagcagcagagattttctcggcggcctggccttcagagtgttccactgtacccagtacatcagacacggcagcaagcccatgtacacccctgagcctgatatctgccacgagctgctgggacatgtgcccctgttcagcgatagaagcttcgcccagttcagccaagagatcggactggcttctctgggagcccctgacgagtacattgagaagctggccaccatctactggttcaccgtggaattcggcctgtgcaagcagggcgacagcatcaaagcttatggcgctggcctgctgtctagcttcggcgagctgcagtactgtctgagcgagaagcctaagctgctgcccctggaactggaaaagaccgccatccagaactacaccgtgaccgagttccagcctctgtactacgtggccgagagcttcaacgacgccaaagaaaaagtgcggaacttcgccgccaccattcctcggcctttcagcgtcagatacgacccctacacacagcggatcgaggtgctggacaacacacagcagctgaaaattctggccgactccatcaacagcgagatcggcatcctgtgcagcgccctgcagaaaatcaagtgatagttaattaagagcatcttaccgccatttattcccatatttgttctgtttttcttgatttgggtatacatttaaatgttaataaaacaaaatggtggggcaatcatttacatttttagggatatgtaattactagttcaggtgtattgccacaagacaaacatgttaagaaactttcccgttatttacgctctgttcctgttaatcaacctctggattacaaaatttgtgaaagattgactgatattcttaactatgttgctccttttacgctgtgtggatatgctgctttatagcctctgtatctagctattgcttcccgtacggctttcgttttctcctccttgtataaatcctggttgctgtctcttttagaggagttgtggcccgttgtccgtcaacgtggcgtggtgtgctctgtgtttgctgacgcaacccccactggctggggcattgccaccacctgtcaactcctttctgggactttcgctttccccctcccgatcgccacggcagaactcatcgccgcctgccttgcccgctgctggacaggggctaggttgctgggcactgataattccgtggtgttgtctgtgccttctagttgccagccatctgttgtttgcccctcccccgtgccttccttgaccctggaaggtgccactcccactgtcctttcctaataaaatgaggaaattgcatcgcattgtctgagtaggtgtcattctattctggggggtggggtggggcaggacagcaagggggaggattgggaagacaatagcaggcatgctggggatgcggtgggctctatggccttaagaactaggttgtgaagtctctggccctccgcgcctacagctcaagccacatccgaagggggagggagccgggagctgcgcgcggggccgccggggggaggggtggcaccgcccacgccgggcggccacgaagggcggggcagcgggcgcgcgcccggcggggggaggggccgcgcgccgcgcccgctgggaattggggcccaagggggagggcggaggcgccgacgaccgcggcacttaacgttcgcggcgtggcgcccggtggtccccaaggggagggaagggggaggcggggcgaggacagtgaccggagtctcctcagcggtggcttttctgcttggcagcctcagcggctggcgccaaaaccggactccgcccacttcctcgcccctgcggtgcgagggtgtggaatcctccagacgctgggggagggggagttgggagcttaaaaactagtacccctttgggaccactttcagcagcgaactctcctgtacaccaggggtcagttccacagacgcgggccaggggtgggtcattgcggcgtgaacaataatttgactagaagttgattcgggtgtttccggaaggggccgagtcaatccgccgagttggggcacggaaaacaaaaagggaaggctactaagatttttctggcgggggttatcattggcgtaactgcagggaccacctcccgctagtcaaactaacctgtttctagagcatggctacgtagataagtagcatggcgggttaatcattaactacacctgcaggaggaacccctagtgatggagttggccactccctctctgcgcgctcgctcgctcactgaggccgggcgaccaaaggtcgcccgacgcccgggcggcctcagtgagcgagcgagcgcgcagctgcctgcagg

SEQ ID NO: 553 - DNA, 3916 bp, Artificial Sequence
  Description of Artificial Sequence: Synthetic polynucleotide
cctgcaggcagctgcgcgctcgctcgctcactgaggccgcccgggcaaagcccgggcgtcgggcgacctttggtcgcccggcctcagtgagcgagcgagcgcgcagagagggagtggccaactccatcactaggggttccttgtagttaatgattaacccgccatgctacttatcgcggccgcaacaggttagtttgactagcgggaggtggtccctgcagttacgccaatgataacccccgccagaaaaatcttagtagccttccctttttgttttccgtgccccaactcggcggattgactcggccccttccggaaacacccgaatcaacttctagtcaaattattgttcacgccgcaatgacccacccctggcccgcgtctgtggaactgacccctggtgtacaggagagttcgctgctgaaagtggtcccaaaggggtactagtttttaagctcccaactccccctcccccagcgtctggaggattccacaccctcgcaccgcaggggcgaggaagtgggcggagtccggttttggcgccagccgctgaggctgccaagcagaaaagccaccgctgaggagactccggtcactgtcctcgccccgcctcccccttccctccccttggggaccaccgggcgccacgccgcgaacgttaagtgccgcggtcgtcggcgcctccgccctcccccttgggccccaattcccagcgggcgcggcgcgcggcccctccccccgccgggcgcgcgcccgctgccccgcccttcgtggccgcccggcgtgggcggtgccacccctccccccggcggccccgcgcgcagctcccggctccctcccccttcggatgtggcttgagctgtaggcgcggagggccagagacttcacaacctagttcatatgcgggggaggctgctggtgaatattaaccaaggtcaccccagttatcggaggagcaaacaggggctaagtccacacgcgtggtaccgtctgtctgcacatttcgtagagcgagtgttccgatactctaatctccctaggcaaggttcatatttgtgtaggttacttattctccttttgttgactaagtcaataatcagaatcagcaggtttggagtcagcttggcagggatcagcagcctgggttggaaggagggggtataaaagccccttcaccaggagaagccgtcacacagatccacaagctcctgaagaggtaagggtttaagggatggttggttggtggggtattaatgtttaattacctggagcacctgcctgaaatcactttttttcaggttggtttaaaccgcagccaccatgagcaccgccgtgctggaaaatcctggcttgggcaggaaactctctgactttggacaggtgagccacggcagcctgagctgctcagttaggggaatttgggcctccagagaaagagatccgaagactgctggtgcttcctggtttcataagctcagtaagaagtctgaattcgttggaagctgatgatagaagaaagagttcatgcttgctttgtccatggaggtttaacaggaatgaattgctaaactgtggaaaatgttttaaacaaatgcatcttatcctgtaggaaacaagctatattgaagacaactgcaatcaaaacggcgccatcagcctgatcttcagcctgaaagaagaagtgggcgccctggccaaggtgctgagactgttcgaagagaacgacgtgaacctgacacacatcgagagcagacccagcagactgaagaaggacgagtacgagttcttcacccacctggacaagcggagcctgcctgctctgaccaacatcatcaagatcctgcggcacgacatcggcgccacagtgcacgaactgagccgggacaagaaaaaggacaccgtgccatggttccccagaaccatccaagagctggacagattcgccaaccagatcctgagctatggcgccgagctggacgctgatcaccctggctttaaggaccccgtgtaccgggccagaagaaagcagtttgccgatatcgcctacaactaccggcacggccagcctattcctcgggtcgagtacatggaagaggaaaagaaaacctggggcaccgtgttcaagaccctgaagtccctgtacaagacccacgcctgctacgagtacaaccacatcttcccactgctcgaaaagtactgcggcttccacgaggacaatatccctcagcttgaggacgtgtcccagttcctgcagacctgcaccggctttagactgaggccagttgccggactgctgagcagcagagattttctcggcggcctggccttcagagtgttccactgtacccagtacatcagacacggcagcaagcccatgtacacccctgagcctgatatctgccacgagctgctgggacatgtgcccctgttcagcgatagaagcttcgcccagttcagccaagagatcggactggcttctctgggagcccctgacgagtacattgagaagctggccaccatctactggttcaccgtggaattcggcctgtgcaagcagggcgacagcatcaaagcttatggcgctggcctgctgtctagcttcggcgagctgcagtactgtctgagcgagaagcctaagctgctgcccctggaactggaaaagaccgccatccagaactacaccgtgaccgagttccagcctctgtactacgtggccgagagcttcaacgacgccaaagaaaaagtgcggaacttcgccgccaccattcctcggcctttcagcgtcagatacgacccctacacacagcggatcgaggtgctggacaacacacagcagctgaaaattctggccgactccatcaacagcgagatcggcatcctgtgcagcgccctgcagaaaatcaagtgatagttaattaagagcatcttaccgccatttattcccatatttgttctgtttttcttgatttgggtatacatttaaatgttaataaaacaaaatggtggggcaatcatttacatttttagggatatgtaattactagttcaggtgtattgccacaagacaaacatgttaagaaactttcccgttatttacgctctgttcctgttaatcaacctctggattacaaaatttgtgaaagattgactgatattcttaactatgttgctccttttacgctgtgtggatatgctgctttatagcctctgtatctagctattgcttcccgtacggctttcgttttctcctccttgtataaatcctggttgctgtctcttttagaggagttgtggcccgttgtccgtcaacgtggcgtggtgtgctctgtgtttgctgacgcaacccccactggctggggcattgccaccacctgtcaactcctttctgggactttcgctttccccctcccgatcgccacggcagaactcatcgccgcctgccttgcccgctgctggacaggggctaggttgctgggcactgataattccgtggtgttgtctgtgccttctagttgccagccatctgttgtttgcccctcccccgtgccttccttgaccctggaaggtgccactcccactgtcctttcctaataaaatgaggaaattgcatcgcattgtctgagtaggtgtcattctattctggggggtggggtggggcaggacagcaagggggaggattgggaagacaatagcaggcatgctggggatgcggtgggctctatggctctagagcatggctacgtagataagtagcatggcgggttaatcattaactacacctgcaggaggaacccctagtgatggagttggccactccctctctgcgcgctcgctcgctcactgaggccgggcgaccaaaggtcgcccgacgcccgggcggcctcagtgagcgagcgagcgcgcagctgcctgcagg

SEQ ID NO: 554 - DNA, 3916 bp, Artificial Sequence
  Description of Artificial Sequence: Synthetic polynucleotide
cctgcaggcagctgcgcgctcgctcgctcactgaggccgcccgggcaaagcccgggcgtcgggcgacctttggtcgcccggcctcagtgagcgagcgagcgcgcagagagggagtggccaactccatcactaggggttccttgtagttaatgattaacccgccatgctacttatcgcggccgcaactaggttgtgaagtctctggccctccgcgcctacagctcaagccacatccgaagggggagggagccgggagctgcgcgcggggccgccggggggaggggtggcaccgcccacgccgggcggccacgaagggcggggcagcgggcgcgcgcccggcggggggaggggccgcgcgccgcgcccgctgggaattggggcccaagggggagggcggaggcgccgacgaccgcggcacttaacgttcgcggcgtggcgcccggtggtccccaaggggagggaagggggaggcggggcgaggacagtgaccggagtctcctcagcggtggcttttctgcttggcagcctcagcggctggcgccaaaaccggactccgcccacttcctcgcccctgcggtgcgagggtgtggaatcctccagacgctgggggagggggagttgggagcttaaaaactagtacccctttgggaccactttcagcagcgaactctcctgtacaccaggggtcagttccacagacgcgggccaggggtgggtcattgcggcgtgaacaataatttgactagaagttgattcgggtgtttccggaaggggccgagtcaatccgccgagttggggcacggaaaacaaaaagggaaggctactaagatttttctggcgggggttatcattggcgtaactgcagggaccacctcccgctagtcaaactaacctgttcatatgcgggggaggctgctggtgaatattaaccaaggtcaccccagttatcggaggagcaaacaggggctaagtccacacgcgtggtaccgtctgtctgcacatttcgtagagcgagtgttccgatactctaatctccctaggcaaggttcatatttgtgtaggttacttattctccttttgttgactaagtcaataatcagaatcagcaggtttggagtcagcttggcagggatcagcagcctgggttggaaggagggggtataaaagccccttcaccaggagaagccgtcacacagatccacaagctcctgaagaggtaagggtttaagggatggttggttggtggggtattaatgtttaattacctggagcacctgcctgaaatcactttttttcaggttggtttaaaccgcagccaccatgagcaccgccgtgctggaaaatcctggcttgggcaggaaactctctgactttggacaggtgagccacggcagcctgagctgctcagttaggggaatttgggcctccagagaaagagatccgaagactgctggtgcttcctggtttcataagctcagtaagaagtctgaattcgttggaagctgatgatagaagaaagagttcatgcttgctttgtccatggaggtttaacaggaatgaattgctaaactgtggaaaatgttttaaacaaatgcatcttatcctgtaggaaacaagctatattgaagacaactgcaatcaaaacggcgccatcagcctgatcttcagcctgaaagaagaagtgggcgccctggccaaggtgctgagactgttcgaagagaacgacgtgaacctgacacacatcgagagcagacccagcagactgaagaaggacgagtacgagttcttcacccacctggacaagcggagcctgcctgctctgaccaacatcatcaagatcctgcggcacgacatcggcgccacagtgcacgaactgagccgggacaagaaaaaggacaccgtgccatggttccccagaaccatccaagagctggacagattcgccaaccagatcctgagctatggcgccgagctggacgctgatcaccctggctttaaggaccccgtgtaccgggccagaagaaagcagtttgccgatatcgcctacaactaccggcacggccagcctattcctcgggtcgagtacatggaagaggaaaagaaaacctggggcaccgtgttcaagaccctgaagtccctgtacaagacccacgcctgctacgagtacaaccacatcttcccactgctcgaaaagtactgcggcttccacgaggacaatatccctcagcttgaggacgtgtcccagttcctgcagacctgcaccggctttagactgaggccagttgccggactgctgagcagcagagattttctcggcggcctggccttcagagtgttccactgtacccagtacatcagacacggcagcaagcccatgtacacccctgagcctgatatctgccacgagctgctgggacatgtgcccctgttcagcgatagaagcttcgcccagttcagccaagagatcggactggcttctctgggagcccctgacgagtacattgagaagctggccaccatctactggttcaccgtggaattcggcctgtgcaagcagggcgacagcatcaaagcttatggcgctggcctgctgtctagcttcggcgagctgcagtactgtctgagcgagaagcctaagctgctgcccctggaactggaaaagaccgccatccagaactacaccgtgaccgagttccagcctctgtactacgtggccgagagcttcaacgacgccaaagaaaaagtgcggaacttcgccgccaccattcctcggcctttcagcgtcagatacgacccctacacacagcggatcgaggtgctggacaacacacagcagctgaaaattctggccgactccatcaacagcgagatcggcatcctgtgcagcgccctgcagaaaatcaagtgatagttaattaagagcatcttaccgccatttattcccatatttgttctgtttttcttgatttgggtatacatttaaatgttaataaaacaaaatggtggggcaatcatttacatttttagggatatgtaattactagttcaggtgtattgccacaagacaaacatgttaagaaactttcccgttatttacgctctgttcctgttaatcaacctctggattacaaaatttgtgaaagattgactgatattcttaactatgttgctccttttacgctgtgtggatatgctgctttatagcctctgtatctagctattgcttcccgtacggctttcgttttctcctccttgtataaatcctggttgctgtctcttttagaggagttgtggcccgttgtccgtcaacgtggcgtggtgtgctctgtgtttgctgacgcaacccccactggctggggcattgccaccacctgtcaactcctttctgggactttcgctttccccctcccgatcgccacggcagaactcatcgccgcctgccttgcccgctgctggacaggggctaggttgctgggcactgataattccgtggtgttgtctgtgccttctagttgccagccatctgttgtttgcccctcccccgtgccttccttgaccctggaaggtgccactcccactgtcctttcctaataaaatgaggaaattgcatcgcattgtctgagtaggtgtcattctattctggggggtggggtggggcaggacagcaagggggaggattgggaagacaatagcaggcatgctggggatgcggtgggctctatggctctagagcatggctacgtagataagtagcatggcgggttaatcattaactacacctgcaggaggaacccctagtgatggagttggccactccctctctgcgcgctcgctcgctcactgaggccgggcgaccaaaggtcgcccgacgcccgggcggcctcagtgagcgagcgagcgcgcagctgcctgcagg

SEQ ID NO: 555 - DNA, 3302 bp, Artificial Sequence
  Description of Artificial Sequence: Synthetic polynucleotide
cctgcaggcagctgcgcgctcgctcgctcactgaggccgcccgggcaaagcccgggcgtcgggcgacctttggtcgcccggcctcagtgagcgagcgagcgcgcagagagggagtggccaactccatcactaggggttccttgtagttaatgattaacccgccatgctacttatcgcggccgctcccttgccaatagccggtttaacttgctataattaattcattggtataaactataaacattccaattgagataggggagaaatctagtaatcttctaagcatatgcgggggaggctgctggtgaatattaaccaaggtcaccccagttatcggaggagcaaacaggggctaagtccacacgcgtggtaccgtctgtctgcacatttcgtagagcgagtgttccgatactctaatctccctaggcaaggttcatatttgtgtaggttacttattctccttttgttgactaagtcaataatcagaatcagcaggtttggagtcagcttggcagggatcagcagcctgggttggaaggagggggtataaaagccccttcaccaggagaagccgtcacacagatccacaagctcctgaagaggtaagggtttaagggatggttggttggtggggtattaatgtttaattacctggagcacctgcctgaaatcactttttttcaggttggtttaaaccgcagccaccatgagcaccgccgtgctggaaaatcctggcttgggcaggaaactctctgactttggacaggtgagccacggcagcctgagctgctcagttaggggaatttgggcctccagagaaagagatccgaagactgctggtgcttcctggtttcataagctcagtaagaagtctgaattcgttggaagctgatgatagaagaaagagttcatgcttgctttgtccatggaggtttaacaggaatgaattgctaaactgtggaaaatgttttaaacaaatgcatcttatcctgtaggaaacaagctatattgaagacaactgcaatcaaaacggcgccatcagcctgatcttcagcctgaaagaagaagtgggcgccctggccaaggtgctgagactgttcgaagagaacgacgtgaacctgacacacatcgagagcagacccagcagactgaagaaggacgagtacgagttcttcacccacctggacaagcggagcctgcctgctctgaccaacatcatcaagatcctgcggcacgacatcggcgccacagtgcacgaactgagccgggacaagaaaaaggacaccgtgccatggttccccagaaccatccaagagctggacagattcgccaaccagatcctgagctatggcgccgagctggacgctgatcaccctggctttaaggaccccgtgtaccgggccagaagaaagcagtttgccgatatcgcctacaactaccggcacggccagcctattcctcgggtcgagtacatggaagaggaaaagaaaacctggggcaccgtgttcaagaccctgaagtccctgtacaagacccacgcctgctacgagtacaaccacatcttcccactgctcgaaaagtactgcggcttccacgaggacaatatccctcagcttgaggacgtgtcccagttcctgcagacctgcaccggctttagactgaggccagttgccggactgctgagcagcagagattttctcggcggcctggccttcagagtgttccactgtacccagtacatcagacacggcagcaagcccatgtacacccctgagcctgatatctgccacgagctgctgggacatgtgcccctgttcagcgatagaagcttcgcccagttcagccaagagatcggactggcttctctgggagcccctgacgagtacattgagaagctggccaccatctactggttcaccgtggaattcggcctgtgcaagcagggcgacagcatcaaagcttatggcgctggcctgctgtctagcttcggcgagctgcagtactgtctgagcgagaagcctaagctgctgcccctggaactggaaaagaccgccatccagaactacaccgtgaccgagttccagcctctgtactacgtggccgagagcttcaacgacgccaaagaaaaagtgcggaacttcgccgccaccattcctcggcctttcagcgtcagatacgacccctacacacagcggatcgaggtgctggacaacacacagcagctgaaaattctggccgactccatcaacagcgagatcggcatcctgtgcagcgccctgcagaaaatcaagtgatagttaattaagagcatcttaccgccatttattcccatatttgttctgtttttcttgatttgggtatacatttaaatgttaataaaacaaaatggtggggcaatcatttacatttttagggatatgtaattactagttcaggtgtattgccacaagacaaacatgttaagaaactttcccgttatttacgctctgttcctgttaatcaacctctggattacaaaatttgtgaaagattgactgatattcttaactatgttgctccttttacgctgtgtggatatgctgctttatagcctctgtatctagctattgcttcccgtacggctttcgttttctcctccttgtataaatcctggttgctgtctcttttagaggagttgtggcccgttgtccgtcaacgtggcgtggtgtgctctgtgtttgctgacgcaacccccactggctggggcattgccaccacctgtcaactcctttctgggactttcgctttccccctcccgatcgccacggcagaactcatcgccgcctgccttgcccgctgctggacaggggctaggttgctgggcactgataattccgtggtgttgtctgtgccttctagttgccagccatctgttgtttgcccctcccccgtgccttccttgaccctggaaggtgccactcccactgtcctttcctaataaaatgaggaaattgcatcgcattgtctgagtaggtgtcattctattctggggggtggggtggggcaggacagcaagggggaggattgggaagacaatagcaggcatgctggggatgcggtgggctctatggctctagagcatggctacgtagataagtagcatggcgggttaatcattaactacacctgcaggaggaacccctagtgatggagttggccactccctctctgcgcgctcgctcgctcactgaggccgggcgaccaaaggtcgcccgacgcccgggcggcctcagtgagcgagcgagcgcgcagctgcctgcagg

SEQ ID NO: 556 - DNA, 3402 bp, Artificial Sequence
  Description of Artificial Sequence: Synthetic polynucleotide
cctgcaggcagctgcgcgctcgctcgctcactgaggccgcccgggcaaagcccgggcgtcgggcgacctttggtcgcccggcctcagtgagcgagcgagcgcgcagagagggagtggccaactccatcactaggggttccttgtagttaatgattaacccgccatgctacttatcgcggccgcttctttgaatgttgttatagagccaccttgatgccttgttagtgatggttgctcctatagtagtattcctgtgatgcaaggtaaatatattgaagacctgctgtagacatgaagcagaacttgagtcctgttgagttaactgtgctactactattctgaagaaaatagtgtctacagctggaatgagttggttgctctaccatatgcgggggaggctgctggtgaatattaaccaaggtcaccccagttatcggaggagcaaacaggggctaagtccacacgcgtggtaccgtctgtctgcacatttcgtagagcgagtgttccgatactctaatctccctaggcaaggttcatatttgtgtaggttacttattctccttttgttgactaagtcaataatcagaatcagcaggtttggagtcagcttggcagggatcagcagcctgggttggaaggagggggtataaaagccccttcaccaggagaagccgtcacacagatccacaagctcctgaagaggtaagggtttaagggatggttggttggtggggtattaatgtttaattacctggagcacctgcctgaaatcactttttttcaggttggtttaaaccgcagccaccatgagcaccgccgtgctggaaaatcctggcttgggcaggaaactctctgactttggacaggtgagccacggcagcctgagctgctcagttaggggaatttgggcctccagagaaagagatccgaagactgctggtgcttcctggtttcataagctcagtaagaagtctgaattcgttggaagctgatgatagaagaaagagttcatgcttgctttgtccatggaggtttaacaggaatgaattgctaaactgtggaaaatgttttaaacaaatgcatcttatcctgtaggaaacaagctatattgaagacaactgcaatcaaaacggcgccatcagcctgatcttcagcctgaaagaagaagtgggcgccctggccaaggtgctgagactgttcgaagagaacgacgtgaacctgacacacatcgagagcagacccagcagactgaagaaggacgagtacgagttcttcacccacctggacaagcggagcctgcctgctctgaccaacatcatcaagatcctgcggcacgacatcggcgccacagtgcacgaactgagccgggacaagaaaaaggacaccgtgccatggttccccagaaccatccaagagctggacagattcgccaaccagatcctgagctatggcgccgagctggacgctgatcaccctggctttaaggaccccgtgtaccgggccagaagaaagcagtttgccgatatcgcctacaactaccggcacggccagcctattcctcgggtcgagtacatggaagaggaaaagaaaacctggggcaccgtgttcaagaccctgaagtccctgtacaagacccacgcctgctacgagtacaaccacatcttcccactgctcgaaaagtactgcggcttccacgaggacaatatccctcagcttgaggacgtgtcccagttcctgcagacctgcaccggctttagactgaggccagttgccggactgctgagcagcagagattttctcggcggcctggccttcagagtgttccactgtacccagtacatcagacacggcagcaagcccatgtacacccctgagcctgatatctgccacgagctgctgggacatgtgcccctgttcagcgatagaagcttcgcccagttcagccaagagatcggactggcttctctgggagcccctgacgagtacattgagaagctggccaccatctactggttcaccgtggaattcggcctgtgcaagcagggcgacagcatcaaagcttatggcgctggcctgctgtctagcttcggcgagctgcagtactgtctgagcgagaagcctaagctgctgcccctggaactggaaaagaccgccatccagaactacaccgtgaccgagttccagcctctgtactacgtggccgagagcttcaacgacgccaaagaaaaagtgcggaacttcgccgccaccattcctcggcctttcagcgtcagatacgacccctacacacagcggatcgaggtgctggacaacacacagcagctgaaaattctggccgactccatcaacagcgagatcggcatcctgtgcagcgccctgcagaaaatcaagtgatagttaattaagagcatcttaccgccatttattcccatatttgttctgtttttcttgatttgggtatacatttaaatgttaataaaacaaaatggtggggcaatcatttacatttttagggatatgtaattactagttcaggtgtattgccacaagacaaacatgttaagaaactttcccgttatttacgctctgttcctgttaatcaacctctggattacaaaatttgtgaaagattgactgatattcttaactatgttgctccttttacgctgtgtggatatgctgctttatagcctctgtatctagctattgcttcccgtacggctttcgttttctcctccttgtataaatcctggttgctgtctcttttagaggagttgtggcccgttgtccgtcaacgtggcgtggtgtgctctgtgtttgctgacgcaacccccactggctggggcattgccaccacctgtcaactcctttctgggactttcgctttccccctcccgatcgccacggcagaactcatcgccgcctgccttgcccgctgctggacaggggctaggttgctgggcactgataattccgtggtgttgtctgtgccttctagttgccagccatctgttgtttgcccctcccccgtgccttccttgaccctggaaggtgccactcccactgtcctttcctaataaaatgaggaaattgcatcgcattgtctgagtaggtgtcattctattctggggggtggggtggggcaggacagcaagggggaggattgggaagacaatagcaggcatgctggggatgcggtgggctctatggctctagagcatggctacgtagataagtagcatggcgggttaatcattaactacacctgcaggaggaacccctagtgatggagttggccactccctctctgcgcgctcgctcgctcactgaggccgggcgaccaaaggtcgcccgacgcccgggcggcctcagtgagcgagcgagcgcgcagctgcctgcagg

SEQ ID NO: 557 - DNA, 3402 bp, Artificial Sequence
  Description of Artificial Sequence: Synthetic polynucleotide
cctgcaggcagctgcgcgctcgctcgctcactgaggccgcccgggcaaagcccgggcgtcgggcgacctttggtcgcccggcctcagtgagcgagcgagcgcgcagagagggagtggccaactccatcactaggggttccttgtagttaatgattaacccgccatgctacttatcgcggccgcctaggcctaagatcatactgtgattagttacatataacccagtttaacagtattgagcttgctaaggaactttagcttcaggtatactattttcaagccatcagcttaataactataaatataccactgctgggtgatgatattagaattagggtctagtaaaggatagacagtggcattatgactatatttcaaaaatacatatgcgggggaggctgctggtgaatattaaccaaggtcaccccagttatcggaggagcaaacaggggctaagtccacacgcgtggtaccgtctgtctgcacatttcgtagagcgagtgttccgatactctaatctccctaggcaaggttcatatttgtgtaggttacttattctccttttgttgactaagtcaataatcagaatcagcaggtttggagtcagcttggcagggatcagcagcctgggttggaaggagggggtataaaagccccttcaccaggagaagccgtcacacagatccacaagctcctgaagaggtaagggtttaagggatggttggttggtggggtattaatgtttaattacctggagcacctgcctgaaatcactttttttcaggttggtttaaaccgcagccaccatgagcaccgccgtgctggaaaatcctggcttgggcaggaaactctctgactttggacaggtgagccacggcagcctgagctgctcagttaggggaatttgggcctccagagaaagagatccgaagactgctggtgcttcctggtttcataagctcagtaagaagtctgaattcgttggaagctgatgatagaagaaagagttcatgcttgctttgtccatggaggtttaacaggaatgaattgctaaactgtggaaaatgttttaaacaaatgcatcttatcctgtaggaaacaagctatattgaagacaactgcaatcaaaacggcgccatcagcctgatcttcagcctgaaagaagaagtgggcgccctggccaaggtgctgagactgttcgaagagaacgacgtgaacctgacacacatcgagagcagacccagcagactgaagaaggacgagtacgagttcttcacccacctggacaagcggagcctgcctgctctgaccaacatcatcaagatcctgcggcacgacatcggcgccacagtgcacgaactgagccgggacaagaaaaaggacaccgtgccatggttccccagaaccatccaagagctggacagattcgccaaccagatcctgagctatggcgccgagctggacgctgatcaccctggctttaaggaccccgtgtaccgggccagaagaaagcagtttgccgatatcgcctacaactaccggcacggccagcctattcctcgggtcgagtacatggaagaggaaaagaaaacctggggcaccgtgttcaagaccctgaagtccctgtacaagacccacgcctgctacgagtacaaccacatcttcccactgctcgaaaagtactgcggcttccacgaggacaatatccctcagcttgaggacgtgtcccagttcctgcagacctgcaccggctttagactgaggccagttgccggactgctgagcagcagagattttctcggcggcctggccttcagagtgttccactgtacccagtacatcagacacggcagcaagcccatgtacacccctgagcctgatatctgccacgagctgctgggacatgtgcccctgttcagcgatagaagcttcgcccagttcagccaagagatcggactggcttctctgggagcccctgacgagtacattgagaagctggccaccatctactggttcaccgtggaattcggcctgtgcaagcagggcgacagcatcaaagcttatggcgctggcctgctgtctagcttcggcgagctgcagtactgtctgagcgagaagcctaagctgctgcccctggaactggaaaagaccgccatccagaactacaccgtgaccgagttccagcctctgtactacgtggccgagagcttcaacgacgccaaagaaaaagtgcggaacttcgccgccaccattcctcggcctttcagcgtcagatacgacccctacacacagcggatcgaggtgctggacaacacacagcagctgaaaattctggccgactccatcaacagcgagatcggcatcctgtgcagcgccctgcagaaaatcaagtgatagttaattaagagcatcttaccgccatttattcccatatttgttctgtttttcttgatttgggtatacatttaaatgttaataaaacaaaatggtggggcaatcatttacatttttagggatatgtaattactagttcaggtgtattgccacaagacaaacatgttaagaaactttcccgttatttacgctctgttcctgttaatcaacctctggattacaaaatttgtgaaagattgactgatattcttaactatgttgctccttttacgctgtgtggatatgctgctttatagcctctgtatctagctattgcttcccgtacggctttcgttttctcctccttgtataaatcctggttgctgtctcttttagaggagttgtggcccgttgtccgtcaacgtggcgtggtgtgctctgtgtttgctgacgcaacccccactggctggggcattgccaccacctgtcaactcctttctgggactttcgctttccccctcccgatcgccacggcagaactcatcgccgcctgccttgcccgctgctggacaggggctaggttgctgggcactgataattccgtggtgttgtctgtgccttctagttgccagccatctgttgtttgcccctcccccgtgccttccttgaccctggaaggtgccactcccactgtcctttcctaataaaatgaggaaattgcatcgcattgtctgagtaggtgtcattctattctggggggtggggtggggcaggacagcaagggggaggattgggaagacaatagcaggcatgctggggatgcggtgggctctatggctctagagcatggctacgtagataagtagcatggcgggttaatcattaactacacctgcaggaggaacccctagtgatggagttggccactccctctctgcgcgctcgctcgctcactgaggccgggcgaccaaaggtcgcccgacgcccgggcggcctcagtgagcgagcgagcgcgcagctgcctgcagg

SEQ ID NO: 558 - DNA, 3602 bp, Artificial Sequence
  Description of Artificial Sequence: Synthetic polynucleotide
cctgcaggcagctgcgcgctcgctcgctcactgaggccgcccgggcaaagcccgggcgtcgggcgacctttggtcgcccggcctcagtgagcgagcgagcgcgcagagagggagtggccaactccatcactaggggttccttgtagttaatgattaacccgccatgctacttatcgcggccgcttctttgaatgttgttatagagccaccttgatgccttgttagtgatggttgctcctatagtagtattcctgtgatgcaaggtaaatatattgaagacctgctgtagacatgaagcagaacttgagtcctgttgagttaactgtgctactactattctgaagaaaatagtgtctacagctggaatgagttggttgctctacctaggcctaagatcatactgtgattagttacatataacccagtttaacagtattgagcttgctaaggaactttagcttcaggtatactattttcaagccatcagcttaataactataaatataccactgctgggtgatgatattagaattagggtctagtaaaggatagacagtggcattatgactatatttcaaaaatacatatgcgggggaggctgctggtgaatattaaccaaggtcaccccagttatcggaggagcaaacaggggctaagtccacacgcgtggtaccgtctgtctgcacatttcgtagagcgagtgttccgatactctaatctccctaggcaaggttcatatttgtgtaggttacttattctccttttgttgactaagtcaataatcagaatcagcaggtttggagtcagcttggcagggatcagcagcctgggttggaaggagggggtataaaagccccttcaccaggagaagccgtcacacagatccacaagctcctgaagaggtaagggtttaagggatggttggttggtggggtattaatgtttaattacctggagcacctgcctgaaatcactttttttcaggttggtttaaaccgcagccaccatgagcaccgccgtgctggaaaatcctggcttgggcaggaaactctctgactttggacaggtgagccacggcagcctgagctgctcagttaggggaatttgggcctccagagaaagagatccgaagactgctggtgcttcctggtttcataagctcagtaagaagtctgaattcgttggaagctgatgatagaagaaagagttcatgcttgctttgtccatggaggtttaacaggaatgaattgctaaactgtggaaaatgttttaaacaaatgcatcttatcctgtaggaaacaagctatattgaagacaactgcaatcaaaacggcgccatcagcctgatcttcagcctgaaagaagaagtgggcgccctggccaaggtgctgagactgttcgaagagaacgacgtgaacctgacacacatcgagagcagacccagcagactgaagaaggacgagtacgagttcttcacccacctggacaagcggagcctgcctgctctgaccaacatcatcaagatcctgcggcacgacatcggcgccacagtgcacgaactgagccgggacaagaaaaaggacaccgtgccatggttccccagaaccatccaagagctggacagattcgccaaccagatcctgagctatggcgccgagctggacgctgatcaccctggctttaaggaccccgtgtaccgggccagaagaaagcagtttgccgatatcgcctacaactaccggcacggccagcctattcctcgggtcgagtacatggaagaggaaaagaaaacctggggcaccgtgttcaagaccctgaagtccctgtacaagacccacgcctgctacgagtacaaccacatcttcccactgctcgaaaagtactgcggcttccacgaggacaatatccctcagcttgaggacgtgtcccagttcctgcagacctgcaccggctttagactgaggccagttgccggactgctgagcagcagagattttctcggcggcctggccttcagagtgttccactgtacccagtacatcagacacggcagcaagcccatgtacacccctgagcctgatatctgccacgagctgctgggacatgtgcccctgttcagcgatagaagcttcgcccagttcagccaagagatcggactggcttctctgggagcccctgacgagtacattgagaagctggccaccatctactggttcaccgtggaattcggcctgtgcaagcagggcgacagcatcaaagcttatggcgctggcctgctgtctagcttcggcgagctgcagtactgtctgagcgagaagcctaagctgctgcccctggaactggaaaagaccgccatccagaactacaccgtgaccgagttccagcctctgtactacgtggccgagagcttcaacgacgccaaagaaaaagtgcggaacttcgccgccaccattcctcggcctttcagcgtcagatacgacccctacacacagcggatcgaggtgctggacaacacacagcagctgaaaattctggccgactccatcaacagcgagatcggcatcctgtgcagcgccctgcagaaaatcaagtgatagttaattaagagcatcttaccgccatttattcccatatttgttctgtttttcttgatttgggtatacatttaaatgttaataaaacaaaatggtggggcaatcatttacatttttagggatatgtaattactagttcaggtgtattgccacaagacaaacatgttaagaaactttcccgttatttacgctctgttcctgttaatcaacctctggattacaaaatttgtgaaagattgactgatattcttaactatgttgctccttttacgctgtgtggatatgctgctttatagcctctgtatctagctattgcttcccgtacggctttcgttttctcctccttgtataaatcctggttgctgtctcttttagaggagttgtggcccgttgtccgtcaacgtggcgtggtgtgctctgtgtttgctgacgcaacccccactggctggggcattgccaccacctgtcaactcctttctgggactttcgctttccccctcccgatcgccacggcagaactcatcgccgcctgccttgcccgctgctggacaggggctaggttgctgggcactgataattccgtggtgttgtctgtgccttctagttgccagccatctgttgtttgcccctcccccgtgccttccttgaccctggaaggtgccactcccactgtcctttcctaataaaatgaggaaattgcatcgcattgtctgagtaggtgtcattctattctggggggtggggtggggcaggacagcaagggggaggattgggaagacaatagcaggcatgctggggatgcggtgggctctatggctctagagcatggctacgtagataagtagcatggcgggttaatcattaactacacctgcaggaggaacccctagtgatggagttggccactccctctctgcgcgctcgctcgctcactgaggccgggcgaccaaaggtcgcccgacgcccgggcggcctcagtgagcgagcgagcgcgcagctgcctgcagg

SEQ ID NO: 559 - DNA, 4002 bp, Artificial Sequence
  Description of Artificial Sequence: Synthetic polynucleotide
cctgcaggcagctgcgcgctcgctcgctcactgaggccgcccgggcaaagcccgggcgtcgggcgacctttggtcgcccggcctcagtgagcgagcgagcgcgcagagagggagtggccaactccatcactaggggttccttgtagttaatgattaacccgccatgctacttatcgcggccgcctgtctagctcctcttctgtcattgcaacctctgtaagggttttagttctccttattttttatgtcttgctctggtagtgctgacagaagcataatagtaagagtactgtggatgtacataaagcagcaggcagggctaccaaccttagcctggcaactcatgatactgtctgttcatggacttttaagttgcataagaggaagctttattcctgatagtgatagtagcttcaaatgttgtaagttcagcaaaatgagccaattatcagggcataatccactattcttcacaacaaggtgctctagtgaatttaggtcctctggagcagtatttcaatctactaataggggctctgcaagatggtggcagaggctttccaactgtactctgtgctcttgttaccagtcagcttggtacactccatacaaagtccagcaattgtttttgaattagggtgggtacactcctggcataacagaatgtccctgcaatcaaaagtcctagtccacatgattgattgaccttatactgaagagtaccctgtggaccaagtcaatctgcagatgctacattaacaataaatgttaattacttcactagggattagtctgttattttacacctttttcaaacctctggcacttgcataccattgtagctaagatatgcttctatgaaatagccaccacaggtgataagtccccctacacagcaatcttagagcaatattatccagagattgttgcagcagaaactgctgtatgctttttacctcacacactcctaatgagcttttacccatatgcgggggaggctgctggtgaatattaaccaaggtcaccccagttatcggaggagcaaacaggggctaagtccacacgcgtggtaccgtctgtctgcacatttcgtagagcgagtgttccgatactctaatctccctaggcaaggttcatatttgtgtaggttacttattctccttttgttgactaagtcaataatcagaatcagcaggtttggagtcagcttggcagggatcagcagcctgggttggaaggagggggtataaaagccccttcaccaggagaagccgtcacacagatccacaagctcctgaagaggtaagggtttaagggatggttggttggtggggtattaatgtttaattacctggagcacctgcctgaaatcactttttttcaggttggtttaaaccgcagccaccatgagcaccgccgtgctggaaaatcctggcttgggcaggaaactctctgactttggacaggtgagccacggcagcctgagctgctcagttaggggaatttgggcctccagagaaagagatccgaagactgctggtgcttcctggtttcataagctcagtaagaagtctgaattcgttggaagctgatgatagaagaaagagttcatgcttgctttgtccatggaggtttaacaggaatgaattgctaaactgtggaaaatgttttaaacaaatgcatcttatcctgtaggaaacaagctatattgaagacaactgcaatcaaaacggcgccatcagcctgatcttcagcctgaaagaagaagtgggcgccctggccaaggtgctgagactgttcgaagagaacgacgtgaacctgacacacatcgagagcagacccagcagactgaagaaggacgagtacgagttcttcacccacctggacaagcggagcctgcctgctctgaccaacatcatcaagatcctgcggcacgacatcggcgccacagtgcacgaactgagccgggacaagaaaaaggacaccgtgccatggttccccagaaccatccaagagctggacagattcgccaaccagatcctgagctatggcgccgagctggacgctgatcaccctggctttaaggaccccgtgtaccgggccagaagaaagcagtttgccgatatcgcctacaactaccggcacggccagcctattcctcgggtcgagtacatggaagaggaaaagaaaacctggggcaccgtgttcaagaccctgaagtccctgtacaagacccacgcctgctacgagtacaaccacatcttcccactgctcgaaaagtactgcggcttccacgaggacaatatccctcagcttgaggacgtgtcccagttcctgcagacctgcaccggctttagactgaggccagttgccggactgctgagcagcagagattttctcggcggcctggccttcagagtgttccactgtacccagtacatcagacacggcagcaagcccatgtacacccctgagcctgatatctgccacgagctgctgggacatgtgcccctgttcagcgatagaagcttcgcccagttcagccaagagatcggactggcttctctgggagcccctgacgagtacattgagaagctggccaccatctactggttcaccgtggaattcggcctgtgcaagcagggcgacagcatcaaagcttatggcgctggcctgctgtctagcttcggcgagctgcagtactgtctgagcgagaagcctaagctgctgcccctggaactggaaaagaccgccatccagaactacaccgtgaccgagttccagcctctgtactacgtggccgagagcttcaacgacgccaaagaaaaagtgcggaacttcgccgccaccattcctcggcctttcagcgtcagatacgacccctacacacagcggatcgaggtgctggacaacacacagcagctgaaaattctggccgactccatcaacagcgagatcggcatcctgtgcagcgccctgcagaaaatcaagtgatagttaattaagagcatcttaccgccatttattcccatatttgttctgtttttcttgatttgggtatacatttaaatgttaataaaacaaaatggtggggcaatcatttacatttttagggatatgtaattactagttcaggtgtattgccacaagacaaacatgttaagaaactttcccgttatttacgctctgttcctgttaatcaacctctggattacaaaatttgtgaaagattgactgatattcttaactatgttgctccttttacgctgtgtggatatgctgctttatagcctctgtatctagctattgcttcccgtacggctttcgttttctcctccttgtataaatcctggttgctgtctcttttagaggagttgtggcccgttgtccgtcaacgtggcgtggtgtgctctgtgtttgctgacgcaacccccactggctggggcattgccaccacctgtcaactcctttctgggactttcgctttccccctcccgatcgccacggcagaactcatcgccgcctgccttgcccgctgctggacaggggctaggttgctgggcactgataattccgtggtgttgtctgtgccttctagttgccagccatctgttgtttgcccctcccccgtgccttccttgaccctggaaggtgccactcccactgtcctttcctaataaaatgaggaaattgcatcgcattgtctgagtaggtgtcattctattctggggggtggggtggggcaggacagcaagggggaggattgggaagacaatagcaggcatgctggggatgcggtgggctctatggctctagagcatggctacgtagataagtagcatggcgggttaatcattaactacacctgcaggaggaacccctagtgatggagttggccactccctctctgcgcgctcgctcgctcactgaggccgggcgaccaaaggtcgcccgacgcccgggcggcctcagtgagcgagcgagcgcgcagctgcctgcagg

SEQ ID NO: 560 - DNA, 3840 bp, Artificial Sequence
  Description of Artificial Sequence: Synthetic polynucleotide
cctgcaggcagctgcgcgctcgctcgctcactgaggccgcccgggcaaagcccgggcgtcgggcgacctttggtcgcccggcctcagtgagcgagcgagcgcgcagagagggagtggccaactccatcactaggggttccttgtagttaatgattaacccgccatgctacttatcgcggccgcaggctcagaggcacacaggagtttctgggctcaccctgcccccttccaacccctcagttcccatcctccagcagctgtttgtgtgctgcctctgaagtccacactgaacaaacttcagcctactcatgtccctaaaatgggcaaacattgcaagcagcaaacagcaaacacacagccctccctgcctgctgaccttggagctggggcagaggtcagagacctctctgggcccatgccacctccaacatccactcgaccccttggaatttcggtggagaggagcagaggttgtcctggcgtggtttaggtagtgtgagagggtccgggttcaaaaccacttgctgggtggggagtcgtcagtaagtggctatgccccgaccccgaagcctgtttccccatctgtacaatggaaatgataaagacgcccatctgatagggtttttgtggcaaataaacatttggtttttttgttttgttttgttttgttttttgagatggaggtttgctctgtcgcccaggctggagtgcagtgacacaatctcatctcaccacaaccttcccctgcctcagcctcccaagtagctgggattacaagcatgtgccaccacacctggctaattttctatttttagtagagacgggtttctccatgttggtcagcctcagcctcccaagtaactgggattacaggcctgtgccaccacacccggctaattttttctatttttgacagggacggggtttcaccatgttggtcaggctggtctagaggtactggatcttgctaccagtggaacagccactaaggattctgcagtgagagcagagggccagctaagtggtactctcccagagactgtctgactcacgccaccccctccaccttggacacaggacgctgtggtttctgagccaggtacaatgactcctttcggtaagtgcagtggaagctgtacactgcccaggcaaagcgtccgggcagcgtaggcgggcgactcagatcccagccagtggacttagcccctgtttgctcctccgataactggggtgaccttggttaatattcaccagcagcctcccccgttgcccctctggatccactgcttaaatacggacgaggacagggccctgtctcctcagcttcaggcaccaccactgacctgggacagtgaataattactctaaggtaaatataaaatttttaagtgtataatgtgttaaactactgattctaattgtttctctcttttagattccaacctttggaactgagtttaaaccgcagccaccatgagtacagcagtgttagagaatccaggcctaggtagaaagctgtctgactttggccaggagacctcctacattgaggacaactgcaaccagaatggagccatcagcctgatcttcagcctgaaggaggaggtgggagccctggccaaggtgctgagactgtttgaggagaatgatgtgaacctgacccacattgagtccagaccctccagactgaagaaggatgagtatgagttcttcacccacctggacaagagatccctgcctgctctgaccaacatcatcaagatcctgagacatgatattggagccacagtgcatgagctgagcagggacaagaagaaggacacagtgccttggttccccagaaccatccaggagctggacaggtttgccaaccagatcctgtcctatggagctgagctggatgctgaccaccctggatttaaggatcctgtgtacagggccagaaggaagcagtttgctgacattgcctacaactacaggcatggccagcccatccccagggtggagtacatggaggaggagaagaagacctggggcactgtgttcaagaccctgaagagcctgtacaagacccatgcctgctatgagtacaaccacatcttccccctgctggagaagtactgtggcttccatgaggacaacatccctcagctggaggatgtgtcccagttcctgcagacctgcacaggcttcagactgagacctgtggctggcctgctgtctagcagagacttcctgggaggcctggccttcagagtgttccactgcacccagtacatcagacatggaagcaagcccatgtacacccctgagccagacatctgccatgagctgctgggccatgtgcccctgttctctgatagatcctttgcccagttcagccaggagattggcctggccagcctgggagcccctgatgagtacattgagaagctggccaccatctactggttcacagtggagtttggcctgtgcaagcagggagactccatcaaggcctatggagctggactgctgtcctcctttggagagctgcagtactgcctgtctgagaagcccaagctgctgcccctggagctggagaagacagccatccagaactacacagtgacagagttccagcccctgtactatgtggctgagagcttcaatgatgccaaggagaaggtgagaaactttgctgccaccatccccagacccttctctgtgaggtatgacccctacacccagaggattgaggtgctggacaacacccagcagctgaagatcctggctgactccatcaactctgagattggcatcctgtgctctgccctgcagaagatcaagtaaaccttaattaagagcatcttaccgccatttattcccatatttgttctgtttttcttgatttgggtatacatttaaatgttaataaaacaaaatggtggggcaatcatttacatttttagggatatgtaattactagttcaggtgtattgccacaagacaaacatgttaagaaactttcccgttatttacgctctgttcctgttaatcaacctctggattacaaaatttgtgaaagattgactgatattcttaactatgttgctccttttacgctgtgtggatatgctgctttatagcctctgtatctagctattgcttcccgtacggctttcgttttctcctccttgtataaatcctggttgctgtctcttttagaggagttgtggcccgttgtccgtcaacgtggcgtggtgtgctctgtgtttgctgacgcaacccccactggctggggcattgccaccacctgtcaactcctttctgggactttcgctttccccctcccgatcgccacggcagaactcatcgccgcctgccttgcccgctgctggacaggggctaggttgctgggcactgataattccgtggtgttgtctgtgccttctagttgccagccatctgttgtttgcccctcccccgtgccttccttgaccctggaaggtgccactcccactgtcctttcctaataaaatgaggaaattgcatcgcattgtctgagtaggtgtcattctattctggggggtggggtggggcaggacagcaagggggaggattgggaagacaatagcaggcatgctggggatgcggtgggctctatggctctagagcatggctacgtagataagtagcatggcgggttaatcattaactacacctgcaggaggaacccctagtgatggagttggccactccctctctgcgcgctcgctcgctcactgaggccgggcgaccaaaggtcgcccgacgcccgggcggcctcagtgagcgagcgagcgcgcagctgcctgcagg

SEQ ID NO: 561 - DNA, 3840 bp, Artificial Sequence
  Description of Artificial Sequence: Synthetic polynucleotide
cctgcaggcagctgcgcgctcgctcgctcactgaggccgcccgggcaaagcccgggcgtcgggcgacctttggtcgcccggcctcagtgagcgagcgagcgcgcagagagggagtggccaactccatcactaggggttccttgtagttaatgattaacccgccatgctacttatcgcggccgcaggctcagaggcacacaggagtttctgggctcaccctgcccccttccaacccctcagttcccatcctccagcagctgtttgtgtgctgcctctgaagtccacactgaacaaacttcagcctactcatgtccctaaaatgggcaaacattgcaagcagcaaacagcaaacacacagccctccctgcctgctgaccttggagctggggcagaggtcagagacctctctgggcccatgccacctccaacatccactcgaccccttggaatttcggtggagaggagcagaggttgtcctggcgtggtttaggtagtgtgagagggtccgggttcaaaaccacttgctgggtggggagtcgtcagtaagtggctatgccccgaccccgaagcctgtttccccatctgtacaatggaaatgataaagacgcccatctgatagggtttttgtggcaaataaacatttggtttttttgttttgttttgttttgttttttgagatggaggtttgctctgtcgcccaggctggagtgcagtgacacaatctcatctcaccacaaccttcccctgcctcagcctcccaagtagctgggattacaagcatgtgccaccacacctggctaattttctatttttagtagagacgggtttctccatgttggtcagcctcagcctcccaagtaactgggattacaggcctgtgccaccacacccggctaattttttctatttttgacagggacggggtttcaccatgttggtcaggctggtctagaggtactggatcttgctaccagtggaacagccactaaggattctgcagtgagagcagagggccagctaagtggtactctcccagagactgtctgactcacgccaccccctccaccttggacacaggacgctgtggtttctgagccaggtacaatgactcctttcggtaagtgcagtggaagctgtacactgcccaggcaaagcgtccgggcagcgtaggcgggcgactcagatcccagccagtggacttagcccctgtttgctcctccgataactggggtgaccttggttaatattcaccagcagcctcccccgttgcccctctggatccactgcttaaatacggacgaggacagggccctgtctcctcagcttcaggcaccaccactgacctgggacagtgaataattactctaaggtaaatataaaatttttaagtgtataatgtgttaaactactgattctaattgtttctctcttttagattccaacctttggaactgagtttaaaccgcagccaccatgtccacagctgtgctggagaaccctggcctgggcagaaagctgtctgactttggccaggagacctcctacattgaggacaactgcaaccagaatggagccatctccctgatcttctccctgaaggaggaggtgggagccctggccaaggtgctgagactgtttgaggagaatgatgtgaacctgacccacattgagtccagaccctccagactgaagaaggatgagtatgagttcttcacccacctggacaagagatccctgcctgccctgaccaacatcatcaagatcctgagacatgacattggagccacagtgcatgagctgtccagagacaagaagaaggacacagtgccctggttccccagaaccatccaggagctggacagatttgccaaccagatcctgtcctatggagctgagctggatgctgaccaccctggcttcaaggaccctgtgtacagggccagaagaaagcagtttgctgacattgcctacaactacagacatggccagcccatccccagagtggagtacatggaggaggagaagaagacctggggcacagtgttcaagaccctgaagtccctgtacaagacccatgcctgctatgagtacaaccacatcttccccctgctggagaagtactgtggcttccatgaggacaacatcccccagctggaggatgtgtcccagttcctgcagacctgcacaggcttcagactgagacctgtggctggcctgctgtcctccagagacttcctgggaggcctggccttcagagtgttccactgcacccagtacatcagacatggctccaagcccatgtacacccctgagcctgacatctgccatgagctgctgggccatgtgcccctgttctctgacagatcctttgcccagttctcccaggagattggcctggcctccctgggagcccctgatgagtacattgagaagctggccaccatctactggttcacagtggagtttggcctgtgcaagcagggagactccatcaaggcctatggagctggcctgctgtcctcctttggagagctgcagtactgcctgtctgagaagcccaagctgctgcccctggagctggagaagacagccatccagaactacacagtgacagagttccagcccctgtactatgtggctgagtccttcaatgatgccaaggagaaggtcagaaactttgctgccaccatccccagacccttctctgtgagatatgacccctacacccagagaattgaggtgctggacaacacccagcagctgaagatcctggctgactccatcaactctgagattggcatcctgtgctctgccctgcagaagatcaagtaaaccttaattaagagcatcttaccgccatttattcccatatttgttctgtttttcttgatttgggtatacatttaaatgttaataaaacaaaatggtggggcaatcatttacatttttagggatatgtaattactagttcaggtgtattgccacaagacaaacatgttaagaaactttcccgttatttacgctctgttcctgttaatcaacctctggattacaaaatttgtgaaagattgactgatattcttaactatgttgctccttttacgctgtgtggatatgctgctttatagcctctgtatctagctattgcttcccgtacggctttcgttttctcctccttgtataaatcctggttgctgtctcttttagaggagttgtggcccgttgtccgtcaacgtggcgtggtgtgctctgtgtttgctgacgcaacccccactggctggggcattgccaccacctgtcaactcctttctgggactttcgctttccccctcccgatcgccacggcagaactcatcgccgcctgccttgcccgctgctggacaggggctaggttgctgggcactgataattccgtggtgttgtctgtgccttctagttgccagccatctgttgtttgcccctcccccgtgccttccttgaccctggaaggtgccactcccactgtcctttcctaataaaatgaggaaattgcatcgcattgtctgagtaggtgtcattctattctggggggtggggtggggcaggacagcaagggggaggattgggaagacaatagcaggcatgctggggatgcggtgggctctatggctctagagcatggctacgtagataagtagcatggcgggttaatcattaactacacctgcaggaggaacccctagtgatggagttggccactccctctctgcgcgctcgctcgctcactgaggccgggcgaccaaaggtcgcccgacgcccgggcggcctcagtgagcgagcgagcgcgcagctgcctgcagg

SEQ ID NO: 562 - DNA, 2967 bp, Artificial Sequence
  Description of Artificial Sequence: Synthetic polynucleotide
cctgcaggcagctgcgcgctcgctcgctcactgaggccgcccgggcaaagcccgggcgtcgggcgacctttggtcgcccggcctcagtgagcgagcgagcgcgcagagagggagtggccaactccatcactaggggttccttgtagttaatgattaacccgccatgctacttatcgcggccgccgggggaggctgctggtgaatattaaccaaggtcaccccagttatcggaggagcaaacaggggctaagtccacacgcgtggtaccgtctgtctgcacatttcgtagagcgagtgttccgatactctaatctccctaggcaaggttcatatttgtgtaggttacttattctccttttgttgactaagtcaataatcagaatcagcaggtttggagtcagcttggcagggatcagcagcctgggttggaaggagggggtataaaagccccttcaccaggagaagccgtcacacagatccacaagctcctgaagaggtaagggtttaagggatggttggttggtggggtattaatgtttaattacctggagcacctgcctgaaatcactttttttcaggttggtttaaaccgcagccaccatgtcaactgcagtgttagagaacccaggccttggtagaaagctttcagactttggacaagaaaccagctacattgaagataactgcaaccagaatggtgccatctccctgatcttcagcctgaaggaagaagtgggagccctggccaaggtcctgaggctctttgaagagaatgatgtgaacctcacccacattgagtccagacccagcaggctcaagaaggatgagtatgaattcttcacccacctggataagaggtccctccctgccctcaccaacatcatcaagatcctgagacatgacattggggccactgtccatgaactgtccagggacaagaagaaggacactgtgccctggttcccaaggaccatccaggaactggacagatttgccaaccaaatcctgtcctatggtgctgagctggatgctgaccaccctggattcaaggaccctgtgtacagagccagaaggaaacagtttgcagacattgcctacaactacagacatgggcagcctatcccaagagtggagtacatggaagaagagaagaaaacctggggcactgtgttcaagacccttaagtccctgtacaagacccatgcctgctatgagtacaaccacatcttccccctgctggagaagtactgtggcttccatgaggacaacatcccccagctggaagatgtgtcccagttcctccaaacttgcactgggttcaggctgaggcctgtggctggcctgctgagctccagagacttcttgggtggactggccttcagagtgttccactgcacccagtacatcagacatggctccaagcccatgtacacccctgagcctgacatctgtcatgaactcctgggccatgtgcccttgttcagtgacagaagctttgcccagttcagccaggaaattggccttgcctccctgggagcccctgatgagtacattgaaaagctagccaccatctactggttcactgtggaatttggcttgtgcaaacagggagactccatcaaggcctatggagctggactgctgtcctcctttggggaactgcagtactgcctctctgagaagcccaagctcctgcccctggaactggagaaaacagccatccagaactacactgtcactgagttccagcccctctactatgtggcagagagcttcaatgatgccaaggaaaaagtcagaaactttgctgccaccatcccaaggccattctcagtcagatatgacccctacacccaaaggattgaagtgctggacaacacccagcagctcaagatcttggcagactccataaactcagagattggaatcctgtgctctgccctgcaaaagattaagtaaaccttaattaagagcatcttaccgccatttattcccatatttgttctgtttttcttgatttgggtatacatttaaatgttaataaaacaaaatggtggggcaatcatttacatttttagggatatgtaattactagttcaggtgtattgccacaagacaaacatgttaagaaactttcccgttatttacgctctgttcctgttaatcaacctctggattacaaaatttgtgaaagattgactgatattcttaactatgttgctccttttacgctgtgtggatatgctgctttatagcctctgtatctagctattgcttcccgtacggctttcgttttctcctccttgtataaatcctggttgctgtctcttttagaggagttgtggcccgttgtccgtcaacgtggcgtggtgtgctctgtgtttgctgacgcaacccccactggctggggcattgccaccacctgtcaactcctttctgggactttcgctttccccctcccgatcgccacggcagaactcatcgccgcctgccttgcccgctgctggacaggggctaggttgctgggcactgataattccgtggtgttgtctgtgccttctagttgccagccatctgttgtttgcccctcccccgtgccttccttgaccctggaaggtgccactcccactgtcctttcctaataaaatgaggaaattgcatcgcattgtctgagtaggtgtcattctattctggggggtggggtggggcaggacagcaagggggaggattgggaagacaatagcaggcatgctggggatgcggtgggctctatggctctagagcatggctacgtagataagtagcatggcgggttaatcattaactacacctgcaggaggaacccctagtgatggagttggccactccctctctgcgcgctcgctcgctcactgaggccgggcgaccaaaggtcgcccgacgcccgggcggcctcagtgagcgagcgagcgcgcagctgcctgcagg

SEQ ID NO: 563 - DNA, 2967 bp, Artificial Sequence
  Description of Artificial Sequence: Synthetic polynucleotide
cctgcaggcagctgcgcgctcgctcgctcactgaggccgcccgggcaaagcccgggcgtcgggcgacctttggtcgcccggcctcagtgagcgagcgagcgcgcagagagggagtggccaactccatcactaggggttccttgtagttaatgattaacccgccatgctacttatcgcggccgccgggggaggctgctggtgaatattaaccaaggtcaccccagttatcggaggagcaaacaggggctaagtccacacgcgtggtaccgtctgtctgcacatttcgtagagcgagtgttccgatactctaatctccctaggcaaggttcatatttgtgtaggttacttattctccttttgttgactaagtcaataatcagaatcagcaggtttggagtcagcttggcagggatcagcagcctgggttggaaggagggggtataaaagccccttcaccaggagaagccgtcacacagatccacaagctcctgaagaggtaagggtttaagggatggttggttggtggggtattaatgtttaattacctggagcacctgcctgaaatcactttttttcaggttggtttaaaccgcagccaccatgtcaactgctgtgctggaaaaccctggattaggaagaaagctctcagactttggtcaagaaacctcctacattgaggacaactgcaaccagaatggtgccatctccctcatcttctccctgaaagaggaagtgggagccctggccaaggtcctgaggctctttgaggaaaatgatgtcaacctgacccacattgagtccaggcccagcagactgaagaaggatgagtatgaattcttcacccacctggacaagagaagcctccctgccctcaccaacatcatcaagatcctcagacatgacattggagccactgtgcatgaactcagcagagacaagaagaaggacactgtgccatggttccctaggaccatccaggaactggataggtttgccaaccaaatcctctcctatggagcagagctggatgcagaccaccctggattcaaggacccagtgtacagggccaggaggaaacagtttgcagacattgcctacaactacagacatggccagcccatccctagagtggagtacatggaagaagagaagaaaacctggggcactgtgttcaagaccctgaagtccctgtacaagacccatgcctgctatgagtacaaccacatcttccccctgctggagaagtactgtggcttccatgaggacaacatcccccagctggaagatgtgtcccagttcctccaaacttgcactggattcaggcttagacctgtggctggcctgttgagcagcagagacttcctgggagggctggccttcagagtgttccactgtacccagtacatcagacatggctccaagcccatgtacacccctgagcctgacatctgccatgaattgcttggccatgtgcccctgttcagtgatagatcctttgcccaattctcccaagaaattggcctggccagccttggagcccctgatgagtacattgaaaagcttgccaccatctactggttcactgtggaatttggcctgtgcaaacagggggactccataaaggcctatggtgctggactgctgtcctcctttggggaactgcagtactgcttgtcagagaagcccaagttgctgcccctggaactggaaaagacagccatccagaactacactgtcactgagttccagcccctctactatgtggcagagagcttcaatgatgccaaggaaaaagtcagaaactttgctgccaccatcccaaggccattctcagtcagatatgacccatacacccagaggattgaagtgctggacaacacccagcagctgaagatcctggctgactccatcaactcagagattgggatcctgtgctctgccctccaaaagattaagtaaaccttaattaagagcatcttaccgccatttattcccatatttgttctgtttttcttgatttgggtatacatttaaatgttaataaaacaaaatggtggggcaatcatttacatttttagggatatgtaattactagttcaggtgtattgccacaagacaaacatgttaagaaactttcccgttatttacgctctgttcctgttaatcaacctctggattacaaaatttgtgaaagattgactgatattcttaactatgttgctccttttacgctgtgtggatatgctgctttatagcctctgtatctagctattgcttcccgtacggctttcgttttctcctccttgtataaatcctggttgctgtctcttttagaggagttgtggcccgttgtccgtcaacgtggcgtggtgtgctctgtgtttgctgacgcaacccccactggctggggcattgccaccacctgtcaactcctttctgggactttcgctttccccctcccgatcgccacggcagaactcatcgccgcctgccttgcccgctgctggacaggggctaggttgctgggcactgataattccgtggtgttgtctgtgccttctagttgccagccatctgttgtttgcccctcccccgtgccttccttgaccctggaaggtgccactcccactgtcctttcctaataaaatgaggaaattgcatcgcattgtctgagtaggtgtcattctattctggggggtggggtggggcaggacagcaagggggaggattgggaagacaatagcaggcatgctggggatgcggtgggctctatggctctagagcatggctacgtagataagtagcatggcgggttaatcattaactacacctgcaggaggaacccctagtgatggagttggccactccctctctgcgcgctcgctcgctcactgaggccgggcgaccaaaggtcgcccgacgcccgggcggcctcagtgagcgagcgagcgcgcagctgcctgcagg

SEQ ID NO: 564 - DNA, 2967 bp, Artificial Sequence
  Description of Artificial Sequence: Synthetic polynucleotide
cctgcaggcagctgcgcgctcgctcgctcactgaggccgcccgggcaaagcccgggcgtcgggcgacctttggtcgcccggcctcagtgagcgagcgagcgcgcagagagggagtggccaactccatcactaggggttccttgtagttaatgattaacccgccatgctacttatcgcggccgccgggggaggctgctggtgaatattaaccaaggtcaccccagttatcggaggagcaaacaggggctaagtccacacgcgtggtaccgtctgtctgcacatttcgtagagcgagtgttccgatactctaatctccctaggcaaggttcatatttgtgtaggttacttattctccttttgttgactaagtcaataatcagaatcagcaggtttggagtcagcttggcagggatcagcagcctgggttggaaggagggggtataaaagccccttcaccaggagaagccgtcacacagatccacaagctcctgaagaggtaagggtttaagggatggttggttggtggggtattaatgtttaattacctggagcacctgcctgaaatcactttttttcaggttggtttaaaccgcagccaccatgtccactgctgtccttgaaaaccctggccttggtagaaagctctctgattttggacaagaaaccagctacattgaggacaactgcaaccagaatggtgccatctcactaatcttcagcctgaaggaagaagtgggagccctggccaaggtcttgagactctttgaggaaaatgatgtcaacctcacccacattgagtccaggccatccagactcaagaaggatgagtatgaattcttcacccacctggacaagaggtccttgcctgccctcacaaacatcatcaagatcctgagacatgacattggggccactgtgcatgagctgtccagagacaagaaaaaggacactgtgccttggttcccaagaaccatccaggaactggacagatttgccaaccaaatcctgagctatggggctgagttggatgcagaccaccctggattcaaggacccagtgtacagggccaggagaaagcagtttgcagacattgcctacaactacagacatggccagcccatcccaagggtggagtacatggaagaggaaaagaaaacctggggcactgtgttcaagaccctgaagtccctgtacaagacccatgcctgctatgagtacaaccacatcttccccctcctggaaaagtactgtggcttccatgaggacaacatcccccagctggaagatgtgtcccagttcctccaaacctgtactgggttcaggctgaggcctgtggctggactgctgagctccagggacttcctgggtggactggccttcagggtgttccactgcacccagtacatcagacatggatccaagcccatgtacacccctgagcctgacatttgccatgaactgctgggccatgtgcccttgttcagtgatagaagctttgcccagttctcccaagaaattggcctggcctccctgggagcccctgatgagtacattgaaaagcttgccaccatctactggttcactgtggaatttggcctgtgcaaacagggagactccatcaaggcctatggagctgggctcctgagctcctttggagagctccagtactgcctgtcagagaagcccaagctcctgcccctggaacttgaaaagactgccatccagaactacactgtgactgagttccagcccctgtactatgtggcagagtccttcaatgatgccaaggaaaaagtcagaaactttgctgccaccatcccaagacccttctctgtgagatatgacccctacacccaaaggattgaagtcctggacaacacccagcagctgaagatcctggcagacagcatcaactcagagataggcatcctgtgctcagccctccaaaagattaagtaaaccttaattaagagcatcttaccgccatttattcccatatttgttctgtttttcttgatttgggtatacatttaaatgttaataaaacaaaatggtggggcaatcatttacatttttagggatatgtaattactagttcaggtgtattgccacaagacaaacatgttaagaaactttcccgttatttacgctctgttcctgttaatcaacctctggattacaaaatttgtgaaagattgactgatattcttaactatgttgctccttttacgctgtgtggatatgctgctttatagcctctgtatctagctattgcttcccgtacggctttcgttttctcctccttgtataaatcctggttgctgtctcttttagaggagttgtggcccgttgtccgtcaacgtggcgtggtgtgctctgtgtttgctgacgcaacccccactggctggggcattgccaccacctgtcaactcctttctgggactttcgctttccccctcccgatcgccacggcagaactcatcgccgcctgccttgcccgctgctggacaggggctaggttgctgggcactgataattccgtggtgttgtctgtgccttctagttgccagccatctgttgtttgcccctcccccgtgccttccttgaccctggaaggtgccactcccactgtcctttcctaataaaatgaggaaattgcatcgcattgtctgagtaggtgtcattctattctggggggtggggtggggcaggacagcaagggggaggattgggaagacaatagcaggcatgctggggatgcggtgggctctatggctctagagcatggctacgtagataagtagcatggcgggttaatcattaactacacctgcaggaggaacccctagtgatggagttggccactccctctctgcgcgctcgctcgctcactgaggccgggcgaccaaaggtcgcccgacgcccgggcggcctcagtgagcgagcgagcgcgcagctgcctgcagg

SEQ ID NO: 565 - DNA, 2967 bp, Artificial Sequence
  Description of Artificial Sequence: Synthetic polynucleotide
cctgcaggcagctgcgcgctcgctcgctcactgaggccgcccgggcaaagcccgggcgtcgggcgacctttggtcgcccggcctcagtgagcgagcgagcgcgcagagagggagtggccaactccatcactaggggttccttgtagttaatgattaacccgccatgctacttatcgcggccgccgggggaggctgctggtgaatattaaccaaggtcaccccagttatcggaggagcaaacaggggctaagtccacacgcgtggtaccgtctgtctgcacatttcgtagagcgagtgttccgatactctaatctccctaggcaaggttcatatttgtgtaggttacttattctccttttgttgactaagtcaataatcagaatcagcaggtttggagtcagcttggcagggatcagcagcctgggttggaaggagggggtataaaagccccttcaccaggagaagccgtcacacagatccacaagctcctgaagaggtaagggtttaagggatggttggttggtggggtattaatgtttaattacctggagcacctgcctgaaatcactttttttcaggttggtttaaaccgcagccaccatgagcactgctgtccttgaaaaccctggccttggaagaaagctctctgactttggacaagaaacctcctacattgaggacaactgcaaccagaatggtgccatctccctcatcttctccctgaaagaggaagtgggagccctggccaaggtcctgaggctctttgaagagaatgatgtgaacctcacccacattgagtccagacccagcaggctcaagaaagatgagtatgaattcttcacccacctggacaagagatccttgcctgccctcaccaacatcatcaagatcctgagacatgacattggagccactgtgcatgaactgtccagggacaagaagaaggacactgtgccctggttcccaaggaccatccaggaacttgacagatttgccaaccaaatcctgtcctatggtgctgagctggatgcagaccaccctggattcaaggacccagtgtacagagccaggagaaagcagtttgctgacatagcctacaactacagacatggccagcccattccaagagtggagtacatggaagaagagaagaaaacctgggggactgtgttcaagaccctgaagtccctgtacaagacccatgcctgctatgagtacaaccacatcttccccctgctggagaagtactgtggcttccatgaggacaacatcccccagctggaagatgtgtcccagttcctgcaaacttgcactgggttcaggctcagacctgtggctggcttactgagctccagggacttcctgggtggactagccttcagggtgttccactgcacccagtacatcagacatggctccaagcccatgtacacccctgagcctgatatctgccatgaactgctgggccatgtgcccttgttcagtgacagaagctttgcccagttctcccaagaaattggccttgcctccctgggggcccctgatgagtacattgaaaagctggccaccatctactggttcactgtggaatttggcttgtgcaaacagggagactccatcaaggcctatggggcaggactgctgagcagctttggagagctgcagtactgcctgtcagagaagcccaagctcctgcccctggaactggaaaagactgccatccagaactacactgtcactgagttccagcccctctactatgtggcagagtccttcaatgatgccaaggaaaaagtcaggaactttgcagccacaatccctagaccattctcagtcagatatgacccatacacccagaggattgaagtgctggacaacacccagcagctcaagatcttggctgatagcatcaactcagagattggaatcctgtgttcagccctccaaaagattaagtaaaccttaattaagagcatcttaccgccatttattcccatatttgttctgtttttcttgatttgggtatacatttaaatgttaataaaacaaaatggtggggcaatcatttacatttttagggatatgtaattactagttcaggtgtattgccacaagacaaacatgttaagaaactttcccgttatttacgctctgttcctgttaatcaacctctggattacaaaatttgtgaaagattgactgatattcttaactatgttgctccttttacgctgtgtggatatgctgctttatagcctctgtatctagctattgcttcccgtacggctttcgttttctcctccttgtataaatcctggttgctgtctcttttagaggagttgtggcccgttgtccgtcaacgtggcgtggtgtgctctgtgtttgctgacgcaacccccactggctggggcattgccaccacctgtcaactcctttctgggactttcgctttccccctcccgatcgccacggcagaactcatcgccgcctgccttgcccgctgctggacaggggctaggttgctgggcactgataattccgtggtgttgtctgtgccttctagttgccagccatctgttgtttgcccctcccccgtgccttccttgaccctggaaggtgccactcccactgtcctttcctaataaaatgaggaaattgcatcgcattgtctgagtaggtgtcattctattctggggggtggggtggggcaggacagcaagggggaggattgggaagacaatagcaggcatgctggggatgcggtgggctctatggctctagagcatggctacgtagataagtagcatggcgggttaatcattaactacacctgcaggaggaacccctagtgatggagttggccactccctctctgcgcgctcgctcgctcactgaggccgggcgaccaaaggtcgcccgacgcccgggcggcctcagtgagcgagcgagcgcgcagctgcctgcagg

SEQ ID NO: 566 - DNA, 2967 bp, Artificial Sequence
  Description of Artificial Sequence: Synthetic polynucleotide
cctgcaggcagctgcgcgctcgctcgctcactgaggccgcccgggcaaagcccgggcgtcgggcgacctttggtcgcccggcctcagtgagcgagcgagcgcgcagagagggagtggccaactccatcactaggggttccttgtagttaatgattaacccgccatgctacttatcgcggccgccgggggaggctgctggtgaatattaaccaaggtcaccccagttatcggaggagcaaacaggggctaagtccacacgcgtggtaccgtctgtctgcacatttcgtagagcgagtgttccgatactctaatctccctaggcaaggttcatatttgtgtaggttacttattctccttttgttgactaagtcaataatcagaatcagcaggtttggagtcagcttggcagggatcagcagcctgggttggaaggagggggtataaaagccccttcaccaggagaagccgtcacacagatccacaagctcctgaagaggtaagggtttaagggatggttggttggtggggtattaatgtttaattacctggagcacctgcctgaaatcactttttttcaggttggtttaaaccgcagccaccatgtcaaccgccgtgcttgaaaatcctggactcggaaggaaattgtcagactttggacaagaaacctcctatatcgaggacaactgcaaccagaacggcgccatctctctcatcttttcgctgaaagaagaggtcggagccctggccaaggtcctgagactgttcgaagagaatgacgtcaacctcactcacatcgagtcccgcccgtcacggctgaagaaagacgaatacgagttcttcacccatctggataagcgctcgttgcctgcgctgactaacatcataaagattctgcggcacgacatcggcgcgactgtgcacgagctgagccgggataagaagaaggacactgtgccatggttcccccggaccattcaagaactggacagattcgcgaaccagattctgtcctatggcgccgagctggacgctgaccaccccgggttcaaggaccctgtgtaccgcgctagacgcaagcagttcgcagacatcgcctacaactatcggcatgggcagccgattccccgcgtcgagtacatggaagaagagaagaaaacctggggtaccgtgttcaagactctgaagtcgctgtacaagacccacgcatgctacgagtacaaccatatcttcccgctcctcgagaagtactgcggtttccacgaggataacattccccaattggaagatgtgtcccagttcctgcaaacttgcacaggctttaggcttagaccggtggcgggcctcctgagctcccgggatttcctcggcggactcgccttccgggtgttccactgcactcagtacattcggcacgggagcaagccgatgtacacccccgaaccggatatctgtcatgaacttctgggacacgtgccactcttctccgaccgaagcttcgcgcagttctcccaagaaatcggactggcctccctgggtgcccctgatgagtacatcgaaaagcttgccaccatctactggtttaccgtggagttcggcctgtgcaaacagggagacagcatcaaggcatacggggccggcctgctgtcctcgttcggagaactgcagtactgcctgtcggagaagcccaagttgctgcccctcgaactggagaaaacggccatccagaactacaccgtgaccgagttccagccgctgtactacgtggccgaaagcttcaacgacgccaaggaaaaggtccgcaactttgcggctaccatcccgaggcctttctccgtgcgctacgacccatacactcagcggatcgaagtgctggataacacccagcagctgaagatcctcgccgactccattaactccgagattggaatcctgtgttccgctctgcaaaagattaagtgaaccttaattaagagcatcttaccgccatttattcccatatttgttctgtttttcttgatttgggtatacatttaaatgttaataaaacaaaatggtggggcaatcatttacatttttagggatatgtaattactagttcaggtgtattgccacaagacaaacatgttaagaaactttcccgttatttacgctctgttcctgttaatcaacctctggattacaaaatttgtgaaagattgactgatattcttaactatgttgctccttttacgctgtgtggatatgctgctttatagcctctgtatctagctattgcttcccgtacggctttcgttttctcctccttgtataaatcctggttgctgtctcttttagaggagttgtggcccgttgtccgtcaacgtggcgtggtgtgctctgtgtttgctgacgcaacccccactggctggggcattgccaccacctgtcaactcctttctgggactttcgctttccccctcccgatcgccacggcagaactcatcgccgcctgccttgcccgctgctggacaggggctaggttgctgggcactgataattccgtggtgttgtctgtgccttctagttgccagccatctgttgtttgcccctcccccgtgccttccttgaccctggaaggtgccactcccactgtcctttcctaataaaatgaggaaattgcatcgcattgtctgagtaggtgtcattctattctggggggtggggtggggcaggacagcaagggggaggattgggaagacaatagcaggcatgctggggatgcggtgggctctatggctctagagcatggctacgtagataagtagcatggcgggttaatcattaactacacctgcaggaggaacccctagtgatggagttggccactccctctctgcgcgctcgctcgctcactgaggccgggcgaccaaaggtcgcccgacgcccgggcggcctcagtgagcgagcgagcgcgcagctgcctgcagg

SEQ ID NO: 567 - DNA, 2967 bp, Artificial Sequence
  Description of Artificial Sequence: Synthetic polynucleotide
cctgcaggcagctgcgcgctcgctcgctcactgaggccgcccgggcaaagcccgggcgtcgggcgacctttggtcgcccggcctcagtgagcgagcgagcgcgcagagagggagtggccaactccatcactaggggttccttgtagttaatgattaacccgccatgctacttatcgcggccgccgggggaggctgctggtgaatattaaccaaggtcaccccagttatcggaggagcaaacaggggctaagtccacacgcgtggtaccgtctgtctgcacatttcgtagagcgagtgttccgatactctaatctccctaggcaaggttcatatttgtgtaggttacttattctccttttgttgactaagtcaataatcagaatcagcaggtttggagtcagcttggcagggatcagcagcctgggttggaaggagggggtataaaagccccttcaccaggagaagccgtcacacagatccacaagctcctgaagaggtaagggtttaagggatggttggttggtggggtattaatgtttaattacctggagcacctgcctgaaatcactttttttcaggttggtttaaaccgcagccaccatgtcaaccgccgtgctcgagaaccctggacttggaagaaaactgtcagacttcggacaagagacttcttacatcgaggataactgcaaccagaatggcgcgatttcgctgatattcagcctgaaggaagaggtcggagccctggccaaggtcctgcggcttttcgaggaaaacgacgtgaacctgactcacatcgagtcccggccgagcagactcaagaaggacgaatacgaattcttcacccatctcgataagcgctcgctgccggcgcttactaacattatcaagatcctgcgccacgatatcggagccaccgtgcatgaactgtcgagggataagaaaaaggataccgtgccgtggttcccgaggaccatccaggaactggaccgcttcgctaaccaaatcttgagctatggcgcggaactcgacgctgaccaccccgggttcaaggatcccgtgtaccgggccagacgcaagcagttcgcagacattgcctacaactatcgacacggccagcctattccacgggtggagtacatggaagaagagaaaaagacctggggcaccgtgttcaagaccctgaagtccctgtacaagactcacgcctgctacgagtacaaccacatcttccctctgctcgaaaagtactgcgggttccatgaggacaacatccctcagctcgaggacgtgtcacagttcctgcaaacgtgcactggctttcggctgaggccggtggccggtctgctgagctcaagggattttctgggcggactggcgttccgcgtgttccactgcacccagtatatccgccatggtagcaagcccatgtacactccggagcctgacatttgccacgaactactgggacacgtgccgttgtttagcgaccggtcgtttgcccaattctcccaagaaatcggactggcctccctgggggcgccagacgagtacattgaaaagctcgcaaccatctactggttcaccgtggaattcggactgtgcaaacagggcgattcgatcaaggcctacggcgccgggctcctgtcctccttcggtgaactgcagtactgtctgtccgagaagcccaagctcctgcccctcgagcttgaaaagacagctatccagaactacactgtcaccgagttccagccactctactacgtggccgagtccttcaatgacgccaaggaaaaagtccggaacttcgcggcaaccattcctagacccttctccgtgcgctacgacccgtacacccagcggatcgaagtgctggacaacacccagcagttgaagatcctggccgactccatcaactccgaaatcggtattttgtgttccgccctgcaaaagattaagtgaaccttaattaagagcatcttaccgccatttattcccatatttgttctgtttttcttgatttgggtatacatttaaatgttaataaaacaaaatggtggggcaatcatttacatttttagggatatgtaattactagttcaggtgtattgccacaagacaaacatgttaagaaactttcccgttatttacgctctgttcctgttaatcaacctctggattacaaaatttgtgaaagattgactgatattcttaactatgttgctccttttacgctgtgtggatatgctgctttatagcctctgtatctagctattgcttcccgtacggctttcgttttctcctccttgtataaatcctggttgctgtctcttttagaggagttgtggcccgttgtccgtcaacgtggcgtggtgtgctctgtgtttgctgacgcaacccccactggctggggcattgccaccacctgtcaactcctttctgggactttcgctttccccctcccgatcgccacggcagaactcatcgccgcctgccttgcccgctgctggacaggggctaggttgctgggcactgataattccgtggtgttgtctgtgccttctagttgccagccatctgttgtttgcccctcccccgtgccttccttgaccctggaaggtgccactcccactgtcctttcctaataaaatgaggaaattgcatcgcattgtctgagtaggtgtcattctattctggggggtggggtggggcaggacagcaagggggaggattgggaagacaatagcaggcatgctggggatgcggtgggctctatggctctagagcatggctacgtagataagtagcatggcgggttaatcattaactacacctgcaggaggaacccctagtgatggagttggccactccctctctgcgcgctcgctcgctcactgaggccgggcgaccaaaggtcgcccgacgcccgggcggcctcagtgagcgagcgagcgcgcagctgcctgcagg

SEQ ID NO: 568 - DNA, 2970 bp, Artificial Sequence
  Description of Artificial Sequence: Synthetic polynucleotide
cctgcaggcagctgcgcgctcgctcgctcactgaggccgcccgggcaaagcccgggcgtcgggcgacctttggtcgcccggcctcagtgagcgagcgagcgcgcagagagggagtggccaactccatcactaggggttccttgtagttaatgattaacccgccatgctacttatcgcggccgccgggggaggctgctggtgaatattaaccaaggtcaccccagttatcggaggagcaaacaggggctaagtccacacgcgtggtaccgtctgtctgcacatttcgtagagcgagtgttccgatactctaatctccctaggcaaggttcatatttgtgtaggttacttattctccttttgttgactaagtcaataatcagaatcagcaggtttggagtcagcttggcagggatcagcagcctgggttggaaggagggggtataaaagccccttcaccaggagaagccgtcacacagatccacaagctcctgaagaggtaagggtttaagggatggttggttggtggggtattaatgtttaattacctggagcacctgcctgaaatcactttttttcaggttggtttaaaccgcagccaccatggccgctgtggtgctggaaaatggcgtgctgagcagaaagctgagcgacttcggccaagagacaagctacatcgaggacaacagcaaccagaacggcgctgtgtccctgatcttcagcctgaaagaagaagtgggcgccctggccaaggtgctgagactgtttgaggaaaacgagatcaacctgacgcacatcgagagcagacccagcagactgaacaaggacgagtacgagttcttcacctacctggacaagagaagcaagcccgtgctgggcagcatcatcaagagcctgagaaacgacatcggcgccaccgtgcacgagctgagcagggacaaagaaaagaacaccgtgccatggttccccaggaccatccaagagctggacagattcgccaaccagatcctgtcttacggcgccgagctggacgctgatcaccctggctttaaggaccccgtgtacagagccagaagaaagcagttcgccgatatcgcctacaactacagacacggccagcctattcctagagtcgagtacaccgaggaagagagaaagacctggggcaccgtgttcagaaccctgaaggccctgtacaagacccacgcctgctacgagcacaaccacatcttcccactgctcgaaaagtactgcggcttccgcgaggataacatccctcagcttgaggacgtgtcccagttcctgcagacctgcacaggcttcagactgaggccagttgctggcctgctgtccagcagagattttctcggcggcctggccttcagagtgttccactgtacccagtacatcaggcacggcagcaagcccatgtacacccctgagcctgacatctgccacgagctgctgggacatgtgcctctgttcagcgacagaagcttcgcccagttcagccaagagatcggcctggctagtctgggcgctcctgatgagtacatcgagaagctggccaccatctactggttcaccgtggaattcggcctgtgcaaagagggcgacagcatcaaggcttatggcgccggactgctgtctagctttggcgagctgcagtactgtctgagcgacaagcctaagctgctgcccctggaactggaaaagaccgcctgccaagagtacacagtgaccgagttccagcctctgtactacgtggccgagagcttcaacgacgccaaagaaaaagtgcggaccttcgccgctacaatccccagacctttcagcgtcagatacgacccctacacacagcgcgtggaagtgctggacaacacacagcagctgaagattctggccgactccatcaacagcgaagtgggcatcctgtgtcacgccctgcagaaaatcaagagctgatagttaattaagagcatcttaccgccatttattcccatatttgttctgtttttcttgatttgggtatacatttaaatgttaataaaacaaaatggtggggcaatcatttacatttttagggatatgtaattactagttcaggtgtattgccacaagacaaacatgttaagaaactttcccgttatttacgctctgttcctgttaatcaacctctggattacaaaatttgtgaaagattgactgatattcttaactatgttgctccttttacgctgtgtggatatgctgctttatagcctctgtatctagctattgcttcccgtacggctttcgttttctcctccttgtataaatcctggttgctgtctcttttagaggagttgtggcccgttgtccgtcaacgtggcgtggtgtgctctgtgtttgctgacgcaacccccactggctggggcattgccaccacctgtcaactcctttctgggactttcgctttccccctcccgatcgccacggcagaactcatcgccgcctgccttgcccgctgctggacaggggctaggttgctgggcactgataattccgtggtgttgtctgtgccttctagttgccagccatctgttgtttgcccctcccccgtgccttccttgaccctggaaggtgccactcccactgtcctttcctaataaaatgaggaaattgcatcgcattgtctgagtaggtgtcattctattctggggggtggggtggggcaggacagcaagggggaggattgggaagacaatagcaggcatgctggggatgcggtgggctctatggctctagagcatggctacgtagataagtagcatggcgggttaatcattaactacacctgcaggaggaacccctagtgatggagttggccactccctctctgcgcgctcgctcgctcactgaggccgggcgaccaaaggtcgcccgacgcccgggcggcctcagtgagcgagcgagcgcgcagctgcctgcagg

SEQ ID NO: 569 - DNA, 2970 bp, Artificial Sequence; identical to SEQ ID NO: 568
  Description of Artificial Sequence: Synthetic polynucleotide

SEQ ID NO: 570 - DNA, 3984 bp, Artificial Sequence
  Description of Artificial Sequence: Synthetic polynucleotide
cctgcaggcagctgcgcgctcgctcgctcactgaggccgcccgggcaaagcccgggcgtcgggcgacctttggtcgcccggcctcagtgagcgagcgagcgcgcagagagggagtggccaactccatcactaggggttccttgtagttaatgattaacccgccatgctacttatcgcggccgcgttaatcattaacgcttgtactttggtacagttaatcattaacgcttgtactttggtacagttaatcattaacgcttgtactttggtacaatcgatgcgagaacttgtgcctccccgtgttcctgctctttgtccctctgtcctacttagactaatatttgccttgggtactgcaaacaggaaatgggggagggacaggagtagggcggagggtagttaagaatgtggatccccgtctgtctgcacatttcgtagagcgagtgttccgatactctaatctccctaggcaaggttcatatttgtgtaggttacttattctccttttgttgactaagtcaataatcagaatcagcaggtttggagtcagcttggcagggatcagcagcctgggttggaaggagggggtataaaagccccttcaccaggagaagccgtcacacagatccacaagctcctgaagaggtaagggtttaagggatggttggttggtggggtattaatgtttaattacctggagcacctgcctgaaatcactttttttcaggttgggtttaaaccgcagccaccatgtccacagctgtgctggagaaccctggcttgggcaggaaactctctgactttggacaggtgagccagggcagcctgagctgctcagttaggggaatttgggcctccagagaaagagatcccaagactgctggtgcttcctggtttcataagctcagtaagaagtctgaattggttggaagctgatgagaatatccaggaagtcaacagacaaatgtcctcaacaattgtttctaagtaggagaacatctgtcctgggtggctttcacaggaatgaatgaccattgctttagggggttggggatctggcctccagaactgccaccaattagctgtgtgtctttggacaagttactgtccctctctgttgtctgtttactcttctgtacactgaaggggttccaatccaggtcttaggattcaaaagcctgtgcatgttccatttttagtactttccacactgtatttctcaatgtctttctgggacattttataaatcatattatatcacctctaaggatctttcagtttgttatatatgtgtctattaagttagattgtgagctcctaaaagataaagcattgtcttattcatctttaaatttctcagagcccaaatagtgcctggaacctagtagttgctcaataaaaggtattgaatttacaggattgaatggtgacatcaatgaataattgaagattccttaagctgataactgacccagtagcatcattgatcatttaattgccctggacttacttattttccaccacactacatatttctgtatagaatatatatagctcattgtattgcaagatttaactagaagaaagagttcatgcttgctttgtccatgtaggtttaacaggaatgaattgctaaactgtggaaaatgttttaaacaaatgcatcttatcctgtaggaaacaagctatattgaagacaactgcaatcaaaatggagccatctccctgatcttctccctgaaggaggaggtgggagccctggccaaggtgctgagactgtttgaggagaatgatgtgaacctgacccacattgagtccagaccctccagactgaagaaggatgagtatgagttcttcacccacctggacaagagatccctgcctgccctgaccaacatcatcaagatcctgagacatgacattggagccacagtgcatgagctgtccagagacaagaagaaggacacagtgccctggttccccagaaccatccaggagctggacagatttgccaaccagatcctgtcctatggagctgagctggatgctgaccaccctggcttcaaggaccctgtgtacagggccagaagaaagcagtttgctgacattgcctacaactacagacatggccagcccatccccagagtggagtacatggaggaggagaagaagacctggggcacagtgttcaagaccctgaagtccctgtacaagacccatgcctgctatgagtacaaccacatcttccccctgctggagaagtactgtggcttccatgaggacaacatcccccagctggaggatgtgtcccagttcctgcagacctgcacaggcttcagactgagacctgtggctggcctgctgtcctccagagacttcctgggaggcctggccttcagagtgttccactgcacccagtacatcagacatggctccaagcccatgtacacccctgagcctgacatctgccatgagctgctgggccatgtgcccctgttctctgacagatcctttgcccagttctcccaggagattggcctggcctccctgggagcccctgatgagtacattgagaagctggccaccatctactggttcacagtggagtttggcctgtgcaagcagggagactccatcaaggcctatggagctggcctgctgtcctcctttggagagctgcagtactgcctgtctgagaagcccaagctgctgcccctggagctggagaagacagccatccagaactacacagtgacagagttccagcccctgtactatgtggctgagtccttcaatgatgccaaggagaaggtcagaaactttgctgccaccatccccagacccttctctgtgagatatgacccctacacccagagaattgaggtgctggacaacacccagcagctgaagatcctggctgactccatcaactctgagattggcatcctgtgctctgccctgcagaagatcaagtaaaccttaattaagagcatcttaccgccatttattcccatatttgttctgtttttcttgatttgggtatacatttaaatgttaataaaacaaaatggtggggcaatcatttacatttttagggatatgtaattactagttcaggtgtattgccacaagacaaacatgttaagaaactttcccgttatttacgctctgttcctgttaatcaacctctggattacaaaatttgtgaaagattgactgatattcttaactatgttgctccttttacgctgtgtggatatgctgctttatagcctctgtatctagctattgcttcccgtacggctttcgttttctcctccttgtataaatcctggttgctgtctcttttagaggagttgtggcccgttgtccgtcaacgtggcgtggtgtgctctgtgtttgctgacgcaacccccactggctggggcattgccaccacctgtcaactcctttctgggactttcgctttccccctcccgatcgccacggcagaactcatcgccgcctgccttgcccgctgctggacaggggctaggttgctgggcactgataattccgtggtgttgtctgtgccttctagttgccagccatctgttgtttgcccctcccccgtgccttccttgaccctggaaggtgccactcccactgtcctttcctaataaaatgaggaaattgcatcgcattgtctgagtaggtgtcattctattctggggggtggggtggggcaggacagcaagggggaggattgggaagacaatagcaggcatgctggggatgcggtgggctctatggctctagagcatggctacgtagataagtagcatggcgggttaatcattaactacacctgcaggaggaacccctagtgatggagttggccactccctctctgcgcgctcgctcgctcactgaggccgggcgaccaaaggtcgcccgacgcccgggcggcctcagtgagcgagcgagcgcgcagctgcctgcagg

SEQ ID NO: 571 - DNA, 3346 bp, Artificial Sequence
  Description of Artificial Sequence: Synthetic polynucleotide
cctgcaggcagctgcgcgctcgctcgctcactgaggccgcccgggcaaagcccgggcgtcgggcgacctttggtcgcccggcctcagtgagcgagcgagcgcgcagagagggagtggccaactccatcactaggggttccttgtagttaatgattaacccgccatgctacttatcgcggccgcgttaatcattaacgcttgtactttggtacagttaatcattaacgcttgtactttggtacagttaatcattaacgcttgtactttggtacaatcgatgcgagaacttgtgcctccccgtgttcctgctctttgtccctctgtcctacttagactaatatttgccttgggtactgcaaacaggaaatgggggagggacaggagtagggcggagggtagttaagaatgtggatccccgtctgtctgcacatttcgtagagcgagtgttccgatactctaatctccctaggcaaggttcatatttgtgtaggttacttattctccttttgttgactaagtcaataatcagaatcagcaggtttggagtcagcttggcagggatcagcagcctgggttggaaggagggggtataaaagccccttcaccaggagaagccgtcacacagatccacaagctcctgaagaggtaagggtttaagggatggttggttggtggggtattaatgtttaattacctggagcacctgcctgaaatcactttttttcaggttgggtttaaaccgcagccaccatgtccacagctgtgctggagaaccctggcttgggcaggaaactctctgactttggacaggtgagccagggcagcctgagctgctcagttaggggaatttgggcctccagagaaagagatctgaagactgctggtgcttcctggtttcataagctcagtaagaagtctgaattcattggaagctgatgatagaagaaagagttcatgcttgctttgtccatggaggtttaacaggaatgaattgctaaactgtggaaaatgttttaaacaaatgcatcttatcctgtaggaaacaagctatattgaagacaactgcaatcaaaatggagccatctccctgatcttctccctgaaggaggaggtgggagccctggccaaggtgctgagactgtttgaggagaatgatgtgaacctgacccacattgagtccagaccctccagactgaagaaggatgagtatgagttcttcacccacctggacaagagatccctgcctgccctgaccaacatcatcaagatcctgagacatgacattggagccacagtgcatgagctgtccagagacaagaagaaggacacagtgccctggttccccagaaccatccaggagctggacagatttgccaaccagatcctgtcctatggagctgagctggatgctgaccaccctggcttcaaggaccctgtgtacagggccagaagaaagcagtttgctgacattgcctacaactacagacatggccagcccatccccagagtggagtacatggaggaggagaagaagacctggggcacagtgttcaagaccctgaagtccctgtacaagacccatgcctgctatgagtacaaccacatcttccccctgctggagaagtactgtggcttccatgaggacaacatcccccagctggaggatgtgtcccagttcctgcagacctgcacaggcttcagactgagacctgtggctggcctgctgtcctccagagacttcctgggaggcctggccttcagagtgttccactgcacccagtacatcagacatggctccaagcccatgtacacccctgagcctgacatctgccatgagctgctgggccatgtgcccctgttctctgacagatcctttgcccagttctcccaggagattggcctggcctccctgggagcccctgatgagtacattgagaagctggccaccatctactggttcacagtggagtttggcctgtgcaagcagggagactccatcaaggcctatggagctggcctgctgtcctcctttggagagctgcagtactgcctgtctgagaagcccaagctgctgcccctggagctggagaagacagccatccagaactacacagtgacagagttccagcccctgtactatgtggctgagtccttcaatgatgccaaggagaaggtcagaaactttgctgccaccatccccagacccttctctgtgagatatgacccctacacccagagaattgaggtgctggacaacacccagcagctgaagatcctggctgactccatcaactctgagattggcatcctgtgctctgccctgcagaagatcaagtaaaccttaattaagagcatcttaccgccatttattcccatatttgttctgtttttcttgatttgggtatacatttaaatgttaataaaacaaaatggtggggcaatcatttacatttttagggatatgtaattactagttcaggtgtattgccacaagacaaacatgttaagaaactttcccgttatttacgctctgttcctgttaatcaacctctggattacaaaatttgtgaaagattgactgatattcttaactatgttgctccttttacgctgtgtggatatgctgctttatagcctctgtatctagctattgcttcccgtacggctttcgttttctcctccttgtataaatcctggttgctgtctcttttagaggagttgtggcccgttgtccgtcaacgtggcgtggtgtgctctgtgtttgctgacgcaacccccactggctggggcattgccaccacctgtcaactcctttctgggactttcgctttccccctcccgatcgccacggcagaactcatcgccgcctgccttgcccgctgctggacaggggctaggttgctgggcactgataattccgtggtgttgtctgtgccttctagttgccagccatctgttgtttgcccctcccccgtgccttccttgaccctggaaggtgccactcccactgtcctttcctaataaaatgaggaaattgcatcgcattgtctgagtaggtgtcattctattctggggggtggggtggggcaggacagcaagggggaggattgggaagacaatagcaggcatgctggggatgcggtgggctctatggctctagagcatggctacgtagataagtagcatggcgggttaatcattaactacacctgcaggaggaacccctagtgatggagttggccactccctctctgcgcgctcgctcgctcactgaggccgggcgaccaaaggtcgcccgacgcccgggcggcctcagtgagcgagcgagcgcgcagctgcctgcagg

SEQ ID NO: 572 - DNA, 4108 bp, Artificial Sequence
  Description of Artificial Sequence: Synthetic polynucleotide
cctgcaggcagctgcgcgctcgctcgctcactgaggccgcccgggcaaagcccgggcgtcgggcgacctttggtcgcccggcctcagtgagcgagcgagcgcgcagagagggagtggccaactccatcactaggggttccttgtagttaatgattaacccgccatgctacttatcgcggccgcagcaacagatcattctatgggttaatcattaacaacaggttaggcttgtactttggtacattggctcctagttaatcattaacttagcaatgtgcttgtactttggtacatagttacctagttaatcattaacaaacagtatggcttgtactttggtacaagcaacagatcattctatgggcgagaacttgtgcctccccgtgttcctgctctttgtccctctgtcctacttagactaatatttgccttgggtactgcaaacaggaaatgggggagggacaggagtagggcggagggtagcaattggattctgcagtgagagcagagggccagctaagtggtactctcccagagactgtctgactcacgccaccccctccaccttggacacaggacgctgtggtttctgagccaggtacaatgactcctttcggtaagtgcagtggaagctgtacactgcccaggcaaagcgtccgggcagcgtaggcgggcgactcagatcccagccagtggacttagcccctgtttgctcctccgataactggggtgaccttggttaatattcaccagcagcctcccccgttgcccctctggatccactgcttaaatacggacgaggacagggccctgtctcctcagcttcaggcaccaccactgacctgggacagtgaatgtttaaaccgcagccaccatgtccacagctgtgctggagaaccctggcttgggcaggaaactctctgactttggacaggtgagccagggcagcctgagctgctcagttaggggaatttgggcctccagagaaagagatcccaagactgctggtgcttcctggtttcataagctcagtaagaagtctgaattggttggaagctgatgagaatatccaggaagtcaacagacaaatgtcctcaacaattgtttctaagtaggagaacatctgtcctgggtggctttcacaggaatgaatgaccattgctttagggggttggggatctggcctccagaactgccaccaattagctgtgtgtctttggacaagttactgtccctctctgttgtctgtttactcttctgtacactgaaggggttccaatccaggtcttaggattcaaaagcctgtgcatgttccatttttagtactttccacactgtatttctcaatgtctttctgggacattttataaatcatattatatcacctctaaggatctttcagtttgttatatatgtgtctattaagttagattgtgagctcctaaaagataaagcattgtcttattcatctttaaatttctcagagcccaaatagtgcctggaacctagtagttgctcaataaaaggtattgaatttacaggattgaatggtgacatcaatgaataattgaagattccttaagctgataactgacccagtagcatcattgatcatttaattgccctggacttacttattttccaccacactacatatttctgtatagaatatatatagctcattgtattgcaagatttaactagaagaaagagttcatgcttgctttgtccatgtaggtttaacaggaatgaattgctaaactgtggaaaatgttttaaacaaatgcatcttatcctgtaggaaacaagctatattgaagacaactgcaatcaaaatggagccatctccctgatcttctccctgaaggaggaggtgggagccctggccaaggtgctgagactgtttgaggagaatgatgtgaacctgacccacattgagtccagaccctccagactgaagaaggatgagtatgagttcttcacccacctggacaagagatccctgcctgccctgaccaacatcatcaagatcctgagacatgacattggagccacagtgcatgagctgtccagagacaagaagaaggacacagtgccctggttccccagaaccatccaggagctggacagatttgccaaccagatcctgtcctatggagctgagctggatgctgaccaccctggcttcaaggaccctgtgtacagggccagaagaaagcagtttgctgacattgcctacaactacagacatggccagcccatccccagagtggagtacatggaggaggagaagaagacctggggcacagtgttcaagaccctgaagtccctgtacaagacccatgcctgctatgagtacaaccacatcttccccctgctggagaagtactgtggcttccatgaggacaacatcccccagctggaggatgtgtcccagttcctgcagacctgcacaggcttcagactgagacctgtggctggcctgctgtcctccagagacttcctgggaggcctggccttcagagtgttccactgcacccagtacatcagacatggctccaagcccatgtacacccctgagcctgacatctgccatgagctgctgggccatgtgcccctgttctctgacagatcctttgcccagttctcccaggagattggcctggcctccctgggagcccctgatgagtacattgagaagctggccaccatctactggttcacagtggagtttggcctgtgcaagcagggagactccatcaaggcctatggagctggcctgctgtcctcctttggagagctgcagtactgcctgtctgagaagcccaagctgctgcccctggagctggagaagacagccatccagaactacacagtgacagagttccagcccctgtactatgtggctgagtccttcaatgatgccaaggagaaggtcagaaactttgctgccaccatccccagacccttctctgtgagatatgacccctacacccagagaattgaggtgctggacaacacccagcagctgaagatcctggctgactccatcaactctgagattggcatcctgtgctctgccctgcagaagatcaagtaaaccttaattaagagcatcttaccgccatttattcccatatttgttctgtttttcttgatttgggtatacatttaaatgttaataaaacaaaatggtggggcaatcatttacatttttagggatatgtaattactagttcaggtgtattgccacaagacaaacatgttaagaaactttcccgttatttacgctctgttcctgttaatcaacctctggattacaaaatttgtgaaagattgactgatattcttaactatgttgctccttttacgctgtgtggatatgctgctttatagcctctgtatctagctattgcttcccgtacggctttcgttttctcctccttgtataaatcctggttgctgtctcttttagaggagttgtggcccgttgtccgtcaacgtggcgtggtgtgctctgtgtttgctgacgcaacccccactggctggggcattgccaccacctgtcaactcctttctgggactttcgctttccccctcccgatcgccacggcagaactcatcgccgcctgccttgcccgctgctggacaggggctaggttgctgggcactgataattccgtggtgttgtctgtgccttctagttgccagccatctgttgtttgcccctcccccgtgccttccttgaccctggaaggtgccactcccactgtcctttcctaataaaatgaggaaattgcatcgcattgtctgagtaggtgtcattctattctggggggtggggtggggcaggacagcaagggggaggattgggaagacaatagcaggcatgctggggatgcggtgggctctatggctctagagcatggctacgtagataagtagcatggcgggttaatcattaactacacctgcaggaggaacccctagtgatggagttggccactccctctctgcgcgctcgctcgctcactgaggccgggcgaccaaaggtcgcccgacgcccgggcggcctcagtgagcgagcgagcgcgcagctgcctgcagg

SEQ ID NO: 573 - DNA, 4063 bp, Artificial Sequence
  Description of Artificial Sequence: Synthetic polynucleotide
cctgcaggcagctgcgcgctcgctcgctcactgaggccgcccgggcaaagcccgggcgtcgggcgacctttggtcgcccggcctcagtgagcgagcgagcgcgcagagagggagtggccaactccatcactaggggttccttgtagttaatgattaacccgccatgctacttatcgcggccgcagcaacagatcattctatgggttaatcattaacaacaggttaggttaatcattaacttggctcctagttaatcattaacaaacagtatggttaatcattaacaaattctggggttaatcattaactagttacctagcgagaacttgtgcctccccgtgttcctgctctttgtccctctgtcctacttagactaatatttgccttgggtactgcaaacaggaaatgggggagggacaggagtagggcggagggtagcaattggattctgcagtgagagcagagggccagctaagtggtactctcccagagactgtctgactcacgccaccccctccaccttggacacaggacgctgtggtttctgagccaggtacaatgactcctttcggtaagtgcagtggaagctgtacactgcccaggcaaagcgtccgggcagcgtaggcgggcgactcagatcccagccagtggacttagcccctgtttgctcctccgataactggggtgaccttggttaatattcaccagcagcctcccccgttgcccctctggatccactgcttaaatacggacgaggacagggccctgtctcctcagcttcaggcaccaccactgacctgggacagtgaatgtttaaaccgcagccaccatgtccacagctgtgctggagaaccctggcttgggcaggaaactctctgactttggacaggtgagccagggcagcctgagctgctcagttaggggaatttgggcctccagagaaagagatcccaagactgctggtgcttcctggtttcataagctcagtaagaagtctgaattggttggaagctgatgagaatatccaggaagtcaacagacaaatgtcctcaacaattgtttctaagtaggagaacatctgtcctgggtggctttcacaggaatgaatgaccattgctttagggggttggggatctggcctccagaactgccaccaattagctgtgtgtctttggacaagttactgtccctctctgttgtctgtttactcttctgtacactgaaggggttccaatccaggtcttaggattcaaaagcctgtgcatgttccatttttagtactttccacactgtatttctcaatgtctttctgggacattttataaatcatattatatcacctctaaggatctttcagtttgttatatatgtgtctattaagttagattgtgagctcctaaaagataaagcattgtcttattcatctttaaatttctcagagcccaaatagtgcctggaacctagtagttgctcaataaaaggtattgaatttacaggattgaatggtgacatcaatgaataattgaagattccttaagctgataactgacccagtagcatcattgatcatttaattgccctggacttacttattttccaccacactacatatttctgtatagaatatatatagctcattgtattgcaagatttaactagaagaaagagttcatgcttgctttgtccatgtaggtttaacaggaatgaattgctaaactgtggaaaatgttttaaacaaatgcatcttatcctgtaggaaacaagctatattgaagacaactgcaatcaaaatggagccatctccctgatcttctccctgaaggaggaggtgggagccctggccaaggtgctgagactgtttgaggagaatgatgtgaacctgacccacattgagtccagaccctccagactgaagaaggatgagtatgagttcttcacccacctggacaagagatccctgcctgccctgaccaacatcatcaagatcctgagacatgacattggagccacagtgcatgagctgtccagagacaagaagaaggacacagtgccctggttccccagaaccatccaggagctggacagatttgccaaccagatcctgtcctatggagctgagctggatgctgaccaccctggcttcaaggaccctgtgtacagggccagaagaaagcagtttgctgacattgcctacaactacagacatggccagcccatccccagagtggagtacatggaggaggagaagaagacctggggcacagtgttcaagaccctgaagtccctgtacaagacccatgcctgctatgagtacaaccacatcttccccctgctggagaagtactgtggcttccatgaggacaacatcccccagctggaggatgtgtcccagttcctgcagacctgcacaggcttcagactgagacctgtggctggcctgctgtcctccagagacttcctgggaggcctggccttcagagtgttccactgcacccagtacatcagacatggctccaagcccatgtacacccctgagcctgacatctgccatgagctgctgggccatgtgcccctgttctctgacagatcctttgcccagttctcccaggagattggcctggcctccctgggagcccctgatgagtacattgagaagctggccaccatctactggttcacagtggagtttggcctgtgcaagcagggagactccatcaaggcctatggagctggcctgctgtcctcctttggagagctgcagtactgcctgtctgagaagcccaagctgctgcccctggagctggagaagacagccatccagaactacacagtgacagagttccagcccctgtactatgtggctgagtccttcaatgatgccaaggagaaggtcagaaactttgctgccaccatccccagacccttctctgtgagatatgacccctacacccagagaattgaggtgctggacaacacccagcagctgaagatcctggctgactccatcaactctgagattggcatcctgtgctctgccctgcagaagatcaagtaaaccttaattaagagcatcttaccgccatttattcccatatttgttctgtttttcttgatttgggtatacatttaaatgttaataaaacaaaatggtggggcaatcatttacatttttagggatatgtaattactagttcaggtgtattgccacaagacaaacatgttaagaaactttcccgttatttacgctctgttcctgttaatcaacctctggattacaaaatttgtgaaagattgactgatattcttaactatgttgctccttttacgctgtgtggatatgctgctttatagcctctgtatctagctattgcttcccgtacggctttcgttttctcctccttgtataaatcctggttgctgtctcttttagaggagttgtggcccgttgtccgtcaacgtggcgtggtgtgctctgtgtttgctgacgcaacccccactggctggggcattgccaccacctgtcaactcctttctgggactttcgctttccccctcccgatcgccacggcagaactcatcgccgcctgccttgcccgctgctggacaggggctaggttgctgggcactgataattccgtggtgttgtctgtgccttctagttgccagccatctgttgtttgcccctcccccgtgccttccttgaccctggaaggtgccactcccactgtcctttcctaataaaatgaggaaattgcatcgcattgtctgagtaggtgtcattctattctggggggtggggtggggcaggacagcaagggggaggattgggaagacaatagcaggcatgctggggatgcggtgggctctatggctctagagcatggctacgtagataagtagcatggcgggttaatcattaactacacctgcaggaggaacccctagtgatggagttggccactccctctctgcgcgctcgctcgctcactgaggccgggcgaccaaaggtcgcccgacgcccgggcggcctcagtgagcgagcgagcgcgcagctgcctgcagg

SEQ ID NO: 574 - DNA, 3470 bp, Artificial Sequence
  Description of Artificial Sequence: Synthetic polynucleotide
cctgcaggcagctgcgcgctcgctcgctcactgaggccgcccgggcaaagcccgggcgtcgggcgacctttggtcgcccggcctcagtgagcgagcgagcgcgcagagagggagtggccaactccatcactaggggttccttgtagttaatgattaacccgccatgctacttatcgcggccgcagcaacagatcattctatgggttaatcattaacaacaggttaggcttgtactttggtacattggctcctagttaatcattaacttagcaatgtgcttgtactttggtacatagttacctagttaatcattaacaaacagtatggcttgtactttggtacaagcaacagatcattctatgggcgagaacttgtgcctccccgtgttcctgctctttgtccctctgtcctacttagactaatatttgccttgggtactgcaaacaggaaatgggggagggacaggagtagggcggagggtagcaattggattctgcagtgagagcagagggccagctaagtggtactctcccagagactgtctgactcacgccaccccctccaccttggacacaggacgctgtggtttctgagccaggtacaatgactcctttcggtaagtgcagtggaagctgtacactgcccaggcaaagcgtccgggcagcgtaggcgggcgactcagatcccagccagtggacttagcccctgtttgctcctccgataactggggtgaccttggttaatattcaccagcagcctcccccgttgcccctctggatccactgcttaaatacggacgaggacagggccctgtctcctcagcttcaggcaccaccactgacctgggacagtgaatgtttaaaccgcagccaccatgtccacagctgtgctggagaaccctggcttgggcaggaaactctctgactttggacaggtgagccagggcagcctgagctgctcagttaggggaatttgggcctccagagaaagagatctgaagactgctggtgcttcctggtttcataagctcagtaagaagtctgaattcattggaagctgatgatagaagaaagagttcatgcttgctttgtccatggaggtttaacaggaatgaattgctaaactgtggaaaatgttttaaacaaatgcatcttatcctgtaggaaacaagctatattgaagacaactgcaatcaaaatggagccatctccctgatcttctccctgaaggaggaggtgggagccctggccaaggtgctgagactgtttgaggagaatgatgtgaacctgacccacattgagtccagaccctccagactgaagaaggatgagtatgagttcttcacccacctggacaagagatccctgcctgccctgaccaacatcatcaagatcctgagacatgacattggagccacagtgcatgagctgtccagagacaagaagaaggacacagtgccctggttccccagaaccatccaggagctggacagatttgccaaccagatcctgtcctatggagctgagctggatgctgaccaccctggcttcaaggaccctgtgtacagggccagaagaaagcagtttgctgacattgcctacaactacagacatggccagcccatccccagagtggagtacatggaggaggagaagaagacctggggcacagtgttcaagaccctgaagtccctgtacaagacccatgcctgctatgagtacaaccacatcttccccctgctggagaagtactgtggcttccatgaggacaacatcccccagctggaggatgtgtcccagttcctgcagacctgcacaggcttcagactgagacctgtggctggcctgctgtcctccagagacttcctgggaggcctggccttcagagtgttccactgcacccagtacatcagacatggctccaagcccatgtacacccctgagcctgacatctgccatgagctgctgggccatgtgcccctgttctctgacagatcctttgcccagttctcccaggagattggcctggcctccctgggagcccctgatgagtacattgagaagctggccaccatctactggttcacagtggagtttggcctgtgcaagcagggagactccatcaaggcctatggagctggcctgctgtcctcctttggagagctgcagtactgcctgtctgagaagcccaagctgctgcccctggagctggagaagacagccatccagaactacacagtgacagagttccagcccctgtactatgtggctgagtccttcaatgatgccaaggagaaggtcagaaactttgctgccaccatccccagacccttctctgtgagatatgacccctacacccagagaattgaggtgctggacaacacccagcagctgaagatcctggctgactccatcaactctgagattggcatcctgtgctctgccctgcagaagatcaagtaaaccttaattaagagcatcttaccgccatttattcccatatttgttctgtttttcttgatttgggtatacatttaaatgttaataaaacaaaatggtggggcaatcatttacatttttagggatatgtaattactagttcaggtgtattgccacaagacaaacatgttaagaaactttcccgttatttacgctctgttcctgttaatcaacctctggattacaaaatttgtgaaagattgactgatattcttaactatgttgctccttttacgctgtgtggatatgctgctttatagcctctgtatctagctattgcttcccgtacggctttcgttttctcctccttgtataaatcctggttgctgtctcttttagaggagttgtggcccgttgtccgtcaacgtggcgtggtgtgctctgtgtttgctgacgcaacccccactggctggggcattgccaccacctgtcaactcctttctgggactttcgctttccccctcccgatcgccacggcagaactcatcgccgcctgccttgcccgctgctggacaggggctaggttgctgggcactgataattccgtggtgttgtctgtgccttctagttgccagccatctgttgtttgcccctcccccgtgccttccttgaccctggaaggtgccactcccactgtcctttcctaataaaatgaggaaattgcatcgcattgtctgagtaggtgtcattctattctggggggtggggtggggcaggacagcaagggggaggattgggaagacaatagcaggcatgctggggatgcggtgggctctatggctctagagcatggctacgtagataagtagcatggcgggttaatcattaactacacctgcaggaggaacccctagtgatggagttggccactccctctctgcgcgctcgctcgctcactgaggccgggcgaccaaaggtcgcccgacgcccgggcggcctcagtgagcgagcgagcgcgcagctgcctgcagg

SEQ ID NO: 575 - DNA, 3425 bp, Artificial Sequence
  Description of Artificial Sequence: Synthetic polynucleotide
cctgcaggcagctgcgcgctcgctcgctcactgaggccgcccgggcaaagcccgggcgtcgggcgacctttggtcgcccggcctcagtgagcgagcgagcgcgcagagagggagtggccaactccatcactaggggttccttgtagttaatgattaacccgccatgctacttatcgcggccgcagcaacagatcattctatgggttaatcattaacaacaggttaggttaatcattaacttggctcctagttaatcattaacaaacagtatggttaatcattaacaaattctggggttaatcattaactagttacctagcgagaacttgtgcctccccgtgttcctgctctttgtccctctgtcctacttagactaatatttgccttgggtactgcaaacaggaaatgggggagggacaggagtagggcggagggtagcaattggattctgcagtgagagcagagggccagctaagtggtactctcccagagactgtctgactcacgccaccccctccaccttggacacaggacgctgtggtttctgagccaggtacaatgactcctttcggtaagtgcagtggaagctgtacactgcccaggcaaagcgtccgggcagcgtaggcgggcgactcagatcccagccagtggacttagcccctgtttgctcctccgataactggggtgaccttggttaatattcaccagcagcctcccccgttgcccctctggatccactgcttaaatacggacgaggacagggccctgtctcctcagcttcaggcaccaccactgacctgggacagtgaatgtttaaaccgcagccaccatgtccacagctgtgctggagaaccctggcttgggcaggaaactctctgactttggacaggtgagccagggcagcctgagctgctcagttaggggaatttgggcctccagagaaagagatctgaagactgctggtgcttcctggtttcataagctcagtaagaagtctgaattcattggaagctgatgatagaagaaagagttcatgcttgctttgtccatggaggtttaacaggaatgaattgctaaactgtggaaaatgttttaaacaaatgcatcttatcctgtaggaaacaagctatattgaagacaactgcaatcaaaatggagccatctccctgatcttctccctgaaggaggaggtgggagccctggccaaggtgctgagactgtttgaggagaatgatgtgaacctgacccacattgagtccagaccctccagactgaagaaggatgagtatgagttcttcacccacctggacaagagatccctgcctgccctgaccaacatcatcaagatcctgagacatgacattggagccacagtgcatgagctgtccagagacaagaagaaggacacagtgccctggttccccagaaccatccaggagctggacagatttgccaaccagatcctgtcctatggagctgagctggatgctgaccaccctggcttcaaggaccctgtgtacagggccagaagaaagcagtttgctgacattgcctacaactacagacatggccagcccatccccagagtggagtacatggaggaggagaagaagacctggggcacagtgttcaagaccctgaagtccctgtacaagacccatgcctgctatgagtacaaccacatcttccccctgctggagaagtactgtggcttccatgaggacaacatcccccagctggaggatgtgtcccagttcctgcagacctgcacaggcttcagactgagacctgtggctggcctgctgtcctccagagacttcctgggaggcctggccttcagagtgttccactgcacccagtacatcagacatggctccaagcccatgtacacccctgagcctgacatctgccatgagctgctgggccatgtgcccctgttctctgacagatcctttgcccagttctcccaggagattggcctggcctccctgggagcccctgatgagtacattgagaagctggccaccatctactggttcacagtggagtttggcctgtgcaagcagggagactccatcaaggcctatggagctggcctgctgtcctcctttggagagctgcagtactgcctgtctgagaagcccaagctgctgcccctggagctggagaagacagccatccagaactacacagtgacagagttccagcccctgtactatgtggctgagtccttcaatgatgccaaggagaaggtcagaaactttgctgccaccatccccagacccttctctgtgagatatgacccctacacccagagaattgaggtgctggacaacacccagcagctgaagatcctggctgactccatcaactctgagattggcatcctgtgctctgccctgcagaagatcaagtaaaccttaattaagagcatcttaccgccatttattcccatatttgttctgtttttcttgatttgggtatacatttaaatgttaataaaacaaaatggtggggcaatcatttacatttttagggatatgtaattactagttcaggtgtattgccacaagacaaacatgttaagaaactttcccgttatttacgctctgttcctgttaatcaacctctggattacaaaatttgtgaaagattgactgatattcttaactatgttgctccttttacgctgtgtggatatgctgctttatagcctctgtatctagctattgcttcccgtacggctttcgttttctcctccttgtataaatcctggttgctgtctcttttagaggagttgtggcccgttgtccgtcaacgtggcgtggtgtgctctgtgtttgctgacgcaacccccactggctggggcattgccaccacctgtcaactcctttctgggactttcgctttccccctcccgatcgccacggcagaactcatcgccgcctgccttgcccgctgctggacaggggctaggttgctgggcactgataattccgtggtgttgtctgtgccttctagttgccagccatctgttgtttgcccctcccccgtgccttccttgaccctggaaggtgccactcccactgtcctttcctaataaaatgaggaaattgcatcgcattgtctgagtaggtgtcattctattctggggggtggggtggggcaggacagcaagggggaggattgggaagacaatagcaggcatgctggggatgcggtgggctctatggctctagagcatggctacgtagataagtagcatggcgggttaatcattaactacacctgcaggaggaacccctagtgatggagttggccactccctctctgcgcgctcgctcgctcactgaggccgggcgaccaaaggtcgcccgacgcccgggcggcctcagtgagcgagcgagcgcgcagctgcctgcagg

SEQ ID NO: 576 - DNA, 3117 bp, Artificial Sequence
  Description of Artificial Sequence: Synthetic polynucleotide
cctgcaggcagctgcgcgctcgctcgctcactgaggccgcccgggcaaagcccgggcgtcgggcgacctttggtcgcccggcctcagtgagcgagcgagcgcgcagagagggagtggccaactccatcactaggggttccttgtagttaatgattaacccgccatgctacttatcgcggccgcgttaatcattaacgcttgtactttggtacagttaatcattaacgcttgtactttggtacagttaatcattaacgcttgtactttggtacaatcgatgcgagaacttgtgcctccccgtgttcctgctctttgtccctctgtcctacttagactaatatttgccttgggtactgcaaacaggaaatgggggagggacaggagtagggcggagggtagttaagaatgtggatccccgtctgtctgcacatttcgtagagcgagtgttccgatactctaatctccctaggcaaggttcatatttgtgtaggttacttattctccttttgttgactaagtcaataatcagaatcagcaggtttggagtcagcttggcagggatcagcagcctgggttggaaggagggggtataaaagccccttcaccaggagaagccgtcacacagatccacaagctcctgaagaggtaagggtttaagggatggttggttggtggggtattaatgtttaattacctggagcacctgcctgaaatcactttttttcaggttgggtttaaaccgcagccaccatgtccacagctgtgctggagaaccctggcctgggcagaaagctgtctgactttggccaggagacctcctacattgaggacaactgcaaccagaatggagccatctccctgatcttctccctgaaggaggaggtgggagccctggccaaggtgctgagactgtttgaggagaatgatgtgaacctgacccacattgagtccagaccctccagactgaagaaggatgagtatgagttcttcacccacctggacaagagatccctgcctgccctgaccaacatcatcaagatcctgagacatgacattggagccacagtgcatgagctgtccagagacaagaagaaggacacagtgccctggttccccagaaccatccaggagctggacagatttgccaaccagatcctgtcctatggagctgagctggatgctgaccaccctggcttcaaggaccctgtgtacagggccagaagaaagcagtttgctgacattgcctacaactacagacatggccagcccatccccagagtggagtacatggaggaggagaagaagacctggggcacagtgttcaagaccctgaagtccctgtacaagacccatgcctgctatgagtacaaccacatcttccccctgctggagaagtactgtggcttccatgaggacaacatcccccagctggaggatgtgtcccagttcctgcagacctgcacaggcttcagactgagacctgtggctggcctgctgtcctccagagacttcctgggaggcctggccttcagagtgttccactgcacccagtacatcagacatggctccaagcccatgtacacccctgagcctgacatctgccatgagctgctgggccatgtgcccctgttctctgacagatcctttgcccagttctcccaggagattggcctggcctccctgggagcccctgatgagtacattgagaagctggccaccatctactggttcacagtggagtttggcctgtgcaagcagggagactccatcaaggcctatggagctggcctgctgtcctcctttggagagctgcagtactgcctgtctgagaagcccaagctgctgcccctggagctggagaagacagccatccagaactacacagtgacagagttccagcccctgtactatgtggctgagtccttcaatgatgccaaggagaaggtcagaaactttgctgccaccatccccagacccttctctgtgagatatgacccctacacccagagaattgaggtgctggacaacacccagcagctgaagatcctggctgactccatcaactctgagattggcatcctgtgctctgccctgcagaagatcaagtaaaccttaattaagagcatcttaccgccatttattcccatatttgttctgtttttcttgatttgggtatacatttaaatgttaataaaacaaaatggtggggcaatcatttacatttttagggatatgtaattactagttcaggtgtattgccacaagacaaacatgttaagaaactttcccgttatttacgctctgttcctgttaatcaacctctggattacaaaatttgtgaaagattgactgatattcttaactatgttgctccttttacgctgtgtggatatgctgctttatagcctctgtatctagctattgcttcccgtacggctttcgttttctcctccttgtataaatcctggttgctgtctcttttagaggagttgtggcccgttgtccgtcaacgtggcgtggtgtgctctgtgtttgctgacgcaacccccactggctggggcattgccaccacctgtcaactcctttctgggactttcgctttccccctcccgatcgccacggcagaactcatcgccgcctgccttgcccgctgctggacaggggctaggttgctgggcactgataattccgtggtgttgtctgtgccttctagttgccagccatctgttgtttgcccctcccccgtgccttccttgaccctggaaggtgccactcccactgtcctttcctaataaaatgaggaaattgcatcgcattgtctgagtaggtgtcattctattctggggggtggggtggggcaggacagcaagggggaggattgggaagacaatagcaggcatgctggggatgcggtgggctctatggctctagagcatggctacgtagataagtagcatggcgggttaatcattaactacacctgcaggaggaacccctagtgatggagttggccactccctctctgcgcgctcgctcgctcactgaggccgggcgaccaaaggtcgcccgacgcccgggcggcctcagtgagcgagcgagcgcgcagctgcctgcagg

SEQ ID NO: 577 - DNA, 2918 bp, Artificial Sequence
  Description of Artificial Sequence: Synthetic polynucleotide
ctgaggccgcccgggcaaagcccgggcgtcgggcgacctttggtcgcccggcctcagtgagcgagcgagcgcgcagagagggagtggccaactccatcactaggggttccttgtagttaatgattaacccgccatgctacttatcgcggccgcgggggaggctgctggtgaatattaaccaaggtcaccccagttatcggaggagcaaacaggggctaagtccacacgcgtggtaccgtctgtctgcacatttcgtagagcgagtgttccgatactctaatctccctaggcaaggttcatatttgtgtaggttacttattctccttttgttgactaagtcaataatcagaatcagcaggtttggagtcagcttggcagggatcagcagcctgggttggaaggagggggtataaaagccccttcaccaggagaagccgtcacacagatccacaagctcctgaagaggtaagggtttaagggatggttggttggtggggtattaatgtttaattacctggagcacctgcctgaaatcactttttttcaggttggtttaaaccgcagccaccatgagcaccgccgtgctggaaaatcctggcctgggcagaaagctgagcgacttcggccaagagacaagctacatcgaggacaactgcaaccagaacggcgccatcagcctgatcttcagcctgaaagaagaagtgggcgccctggccaaggtgctgagactgttcgaagagaacgacgtgaacctgacacacatcgagagcagacccagcagactgaagaaggacgagtacgagttcttcacccacctggacaagcggagcctgcctgctctgaccaacatcatcaagatcctgcggcacgacatcggcgccacagtgcacgaactgagccgggacaagaaaaaggacaccgtgccatggttccccagaaccatccaagagctggacagattcgccaaccagatcctgagctatggcgccgagctggacgctgatcaccctggctttaaggaccccgtgtaccgggccagaagaaagcagtttgccgatatcgcctacaactaccggcacggccagcctattcctcgggtcgagtacatggaagaggaaaagaaaacctggggcaccgtgttcaagaccctgaagtccctgtacaagacccacgcctgctacgagtacaaccacatcttcccactgctcgaaaagtactgcggcttccacgaggacaatatccctcagcttgaggacgtgtcccagttcctgcagacctgcaccggctttagactgaggccagttgccggactgctgagcagcagagattttctcggcggcctggccttcagagtgttccactgtacccagtacatcagacacggcagcaagcccatgtacacccctgagcctgatatctgccacgagctgctgggacatgtgcccctgttcagcgatagaagcttcgcccagttcagccaagagatcggactggcttctctgggagcccctgacgagtacattgagaagctggccaccatctactggttcaccgtggaattcggcctgtgcaagcagggcgacagcatcaaagcttatggcgctggcctgctgtctagcttcggcgagctgcagtactgtctgagcgagaagcctaagctgctgcccctggaactggaaaagaccgccatccagaactacaccgtgaccgagttccagcctctgtactacgtggccgagagcttcaacgacgccaaagaaaaagtgcggaacttcgccgccaccattcctcggcctttcagcgtcagatacgacccctacacacagcggatcgaggtgctggacaacacacagcagctgaaaattctggccgactccatcaacagcgagatcggcatcctgtgcagcgccctgcagaaaatcaagtgatagttaattaagagcatcttaccgccatttattcccatatttgttctgtttttcttgatttgggtatacatttaaatgttaataaaacaaaatggtggggcaatcatttacatttttagggatatgtaattactagttcaggtgtattgccacaagacaaacatgttaagaaactttcccgttatttacgctctgttcctgttaatcaacctctggattacaaaatttgtgaaagattgactgatattcttaactatgttgctccttttacgctgtgtggatatgctgctttatagcctctgtatctagctattgcttcccgtacggctttcgttttctcctccttgtataaatcctggttgctgtctcttttagaggagttgtggcccgttgtccgtcaacgtggcgtggtgtgctctgtgtttgctgacgcaacccccactggctggggcattgccaccacctgtcaactcctttctgggactttcgctttccccctcccgatcgccacggcagaactcatcgccgcctgccttgcccgctgctggacaggggctaggttgctgggcactgataattccgtggtgttgtctgtgccttctagttgccagccatctgttgtttgcccctcccccgtgccttccttgaccctggaaggtgccactcccactgtcctttcctaataaaatgaggaaattgcatcgcattgtctgagtaggtgtcattctattctggggggtggggtggggcaggacagcaagggggaggattgggaagacaatagcaggcatgctggggatgcggtgggctctatggctctagagcatggctacgtagataagtagcatggcgggttaatcattaactacacctgcaggaggaacccctagtgatggagttggccactccctctctgcgcgctcgctcgctcaactgaggccgcccgggcaaagcccgggcgtcgggcgacctttggtcgcccggcctcag

SEQ ID NO: 578 - DNA, 3174 bp, Artificial Sequence
  Description of Artificial Sequence: Synthetic polynucleotide
ctgaggccgcccgggcaaagcccgggcgtcgggcgacctttggtcgcccggcctcagtgagcgagcgagcgcgcagagagggagtggccaactccatcactaggggttccttgtagttaatgattaacccgccatgctacttatcgcggccgcgggggaggctgctggtaaacattaaccaaggtcaccccagttatcagaggagcaaacaggggcaaagtccaccgggggaggctgctggtaaacattaaccaaggtcaccccagttatcagaggagcaaacaggggcaaagtccaccgggggaggctgctggtaaacattaaccaaggtcaccccagttatcagaggagcaaacaggggcaaagtccacggtacccactgggaggatgttgagtaagatggaaaactactgatgacccttgcagagacagagtattaggacatgtttgaacaggggccgggcgatcagcaggtagctctagaggatccccgtctgtctgcacatttcgtagagcgagtgttccgatactctaatctccctaggcaaggttcatatttgtgtaggttacttattctccttttgttgactaagtcaataatcagaatcagcaggtttggagtcagcttggcagggatcagcagcctgggttggaaggagggggtataaaagccccttcaccaggagaagccgtcacacagatccacaagctcctgaagaggtaagggtttaagggatggttggttggtggggtattaatgtttaattacctggagcacctgcctgaaatcactttttttcaggttgggtttaaaccgcagccaccatgagcaccgccgtgctggaaaatcctggcctgggcagaaagctgagcgacttcggccaagagacaagctacatcgaggacaactgcaaccagaacggcgccatcagcctgatcttcagcctgaaagaagaagtgggcgccctggccaaggtgctgagactgttcgaagagaacgacgtgaacctgacacacatcgagagcagacccagcagactgaagaaggacgagtacgagttcttcacccacctggacaagcggagcctgcctgctctgaccaacatcatcaagatcctgcggcacgacatcggcgccacagtgcacgaactgagccgggacaagaaaaaggacaccgtgccatggttccccagaaccatccaagagctggacagattcgccaaccagatcctgagctatggcgccgagctggacgctgatcaccctggctttaaggaccccgtgtaccgggccagaagaaagcagtttgccgatatcgcctacaactaccggcacggccagcctattcctcgggtcgagtacatggaagaggaaaagaaaacctggggcaccgtgttcaagaccctgaagtccctgtacaagacccacgcctgctacgagtacaaccacatcttcccactgctcgaaaagtactgcggcttccacgaggacaatatccctcagcttgaggacgtgtcccagttcctgcagacctgcaccggctttagactgaggccagttgccggactgctgagcagcagagattttctcggcggcctggccttcagagtgttccactgtacccagtacatcagacacggcagcaagcccatgtacacccctgagcctgatatctgccacgagctgctgggacatgtgcccctgttcagcgatagaagcttcgcccagttcagccaagagatcggactggcttctctgggagcccctgacgagtacattgagaagctggccaccatctactggttcaccgtggaattcggcctgtgcaagcagggcgacagcatcaaagcttatggcgctggcctgctgtctagcttcggcgagctgcagtactgtctgagcgagaagcctaagctgctgcccctggaactggaaaagaccgccatccagaactacaccgtgaccgagttccagcctctgtactacgtggccgagagcttcaacgacgccaaagaaaaagtgcggaacttcgccgccaccattcctcggcctttcagcgtcagatacgacccctacacacagcggatcgaggtgctggacaacacacagcagctgaaaattctggccgactccatcaacagcgagatcggcatcctgtgcagcgccctgcagaaaatcaagtgatagttaattaagagcatcttaccgccatttattcccatatttgttctgtttttcttgatttgggtatacatttaaatgttaataaaacaaaatggtggggcaatcatttacatttttagggatatgtaattactagttcaggtgtattgccacaagacaaacatgttaagaaactttcccgttatttacgctctgttcctgttaatcaacctctggattacaaaatttgtgaaagattgactgatattcttaactatgttgctccttttacgctgtgtggatatgctgctttatagcctctgtatctagctattgcttcccgtacggctttcgttttctcctccttgtataaatcctggttgctgtctcttttagaggagttgtggcccgttgtccgtcaacgtggcgtggtgtgctctgtgtttgctgacgcaacccccactggctggggcattgccaccacctgtcaactcctttctgggactttcgctttccccctcccgatcgccacggcagaactcatcgccgcctgccttgcccgctgctggacaggggctaggttgctgggcactgataattccgtggtgttgtctgtgccttctagttgccagccatctgttgtttgcccctcccccgtgccttccttgaccctggaaggtgccactcccactgtcctttcctaataaaatgaggaaattgcatcgcattgtctgagtaggtgtcattctattctggggggtggggtggggcaggacagcaagggggaggattgggaagacaatagcaggcatgctggggatgcggtgggctctatggctctagagcatggctacgtagataagtagcatggcgggttaatcattaactacacctgcaggaggaacccctagtgatggagttggccactccctctctgcgcgctcgctcgctcaactgaggccgcccgggcaaagcccgggcgtcgggcgacctttggtcgcccggcctcag

SEQ ID NO: 579 - DNA, 2918 bp, Artificial Sequence
  Description of Artificial Sequence: Synthetic polynucleotide
ctgaggccgcccgggcaaagcccgggcgtcgggcgacctttggtcgcccggcctcagtgagcgagcgagcgcgcagagagggagtggccaactccatcactaggggttccttgtagttaatgattaacccgccatgctacttatcgcggccgcgggggaggctgctggtaaacattaaccaaggtcaccccagttatcagaggagcaaacaggggcaaagtccacacgcgtggtaccgtctgtctgcacatttcgtagagcgagtgttccgatactctaatctccctaggcaaggttcatatttgtgtaggttacttattctccttttgttgactaagtcaataatcagaatcagcaggtttggagtcagcttggcagggatcagcagcctgggttggaaggagggggtataaaagccccttcaccaggagaagccgtcacacagatccacaagctcctgaagaggtaagggtttaagggatggttggttggtggggtattaatgtttaattacctggagcacctgcctgaaatcactttttttcaggttggtttaaaccgcagccaccatgagcaccgccgtgctggaaaatcctggcctgggcagaaagctgagcgacttcggccaagagacaagctacatcgaggacaactgcaaccagaacggcgccatcagcctgatcttcagcctgaaagaagaagtgggcgccctggccaaggtgctgagactgttcgaagagaacgacgtgaacctgacacacatcgagagcagacccagcagactgaagaaggacgagtacgagttcttcacccacctggacaagcggagcctgcctgctctgaccaacatcatcaagatcctgcggcacgacatcggcgccacagtgcacgaactgagccgggacaagaaaaaggacaccgtgccatggttccccagaaccatccaagagctggacagattcgccaaccagatcctgagctatggcgccgagctggacgctgatcaccctggctttaaggaccccgtgtaccgggccagaagaaagcagtttgccgatatcgcctacaactaccggcacggccagcctattcctcgggtcgagtacatggaagaggaaaagaaaacctggggcaccgtgttcaagaccctgaagtccctgtacaagacccacgcctgctacgagtacaaccacatcttcccactgctcgaaaagtactgcggcttccacgaggacaatatccctcagcttgaggacgtgtcccagttcctgcagacctgcaccggctttagactgaggccagttgccggactgctgagcagcagagattttctcggcggcctggccttcagagtgttccactgtacccagtacatcagacacggcagcaagcccatgtacacccctgagcctgatatctgccacgagctgctgggacatgtgcccctgttcagcgatagaagcttcgcccagttcagccaagagatcggactggcttctctgggagcccctgacgagtacattgagaagctggccaccatctactggttcaccgtggaattcggcctgtgcaagcagggcgacagcatcaaagcttatggcgctggcctgctgtctagcttcggcgagctgcagtactgtctgagcgagaagcctaagctgctgcccctggaactggaaaagaccgccatccagaactacaccgtgaccgagttccagcctctgtactacgtggccgagagcttcaacgacgccaaagaaaaagtgcggaacttcgccgccaccattcctcggcctttcagcgtcagatacgacccctacacacagcggatcgaggtgctggacaacacacagcagctgaaaattctggccgactccatcaacagcgagatcggcatcctgtgcagcgccctgcagaaaatcaagtgatagttaattaagagcatcttaccgccatttattcccatatttgttctgtttttcttgatttgggtatacatttaaatgttaataaaacaaaatggtggggcaatcatttacatttttagggatatgtaattactagttcaggtgtattgccacaagacaaacatgttaagaaactttcccgttatttacgctctgttcctgttaatcaacctctggattacaaaatttgtgaaagattgactgatattcttaactatgttgctccttttacgctgtgtggatatgctgctttatagcctctgtatctagctattgcttcccgtacggctttcgttttctcctccttgtataaatcctggttgctgtctcttttagaggagttgtggcccgttgtccgtcaacgtggcgtggtgtgctctgtgtttgctgacgcaacccccactggctggggcattgccaccacctgtcaactcctttctgggactttcgctttccccctcccgatcgccacggcagaactcatcgccgcctgccttgcccgctgctggacaggggctaggttgctgggcactgataattccgtggtgttgtctgtgccttctagttgccagccatctgttgtttgcccctcccccgtgccttccttgaccctggaaggtgccactcccactgtcctttcctaataaaatgaggaaattgcatcgcattgtctgagtaggtgtcattctattctggggggtggggtggggcaggacagcaagggggaggattgggaagacaatagcaggcatgctggggatgcggtgggctctatggctctagagcatggctacgtagataagtagcatggcgggttaatcattaactacacctgcaggaggaacccctagtgatggagttggccactccctctctgcgcgctcgctcgctcaactgaggccgcccgggcaaagcccgggcgtcgggcgacctttggtcgcccggcctcag

SEQ ID NO: 580 - DNA, 3069 bp, Artificial Sequence
  Description of Artificial Sequence: Synthetic polynucleotide
ctgaggccgcccgggcaaagcccgggcgtcgggcgacctttggtcgcccggcctcagtgagcgagcgagcgcgcagagagggagtggccaactccatcactaggggttccttgtagttaatgattaacccgccatgctacttatcgcggccgcgttaatcattaacgcttgtactttggtacagttaatcattaacgcttgtactttggtacagttaatcattaacgcttgtactttggtacaatcgatgcgagaacttgtgcctccccgtgttcctgctctttgtccctctgtcctacttagactaatatttgccttgggtactgcaaacaggaaatgggggagggacaggagtagggcggagggtagttaagaatgtggatccccgtctgtctgcacatttcgtagagcgagtgttccgatactctaatctccctaggcaaggttcatatttgtgtaggttacttattctccttttgttgactaagtcaataatcagaatcagcaggtttggagtcagcttggcagggatcagcagcctgggttggaaggagggggtataaaagccccttcaccaggagaagccgtcacacagatccacaagctcctgaagaggtaagggtttaagggatggttggttggtggggtattaatgtttaattacctggagcacctgcctgaaatcactttttttcaggttgggtttaaaccgcagccaccatgagcaccgccgtgctggaaaatcctggcctgggcagaaagctgagcgacttcggccaagagacaagctacatcgaggacaactgcaaccagaacggcgccatcagcctgatcttcagcctgaaagaagaagtgggcgccctggccaaggtgctgagactgttcgaagagaacgacgtgaacctgacacacatcgagagcagacccagcagactgaagaaggacgagtacgagttcttcacccacctggacaagcggagcctgcctgctctgaccaacatcatcaagatcctgcggcacgacatcggcgccacagtgcacgaactgagccgggacaagaaaaaggacaccgtgccatggttccccagaaccatccaagagctggacagattcgccaaccagatcctgagctatggcgccgagctggacgctgatcaccctggctttaaggaccccgtgtaccgggccagaagaaagcagtttgccgatatcgcctacaactaccggcacggccagcctattcctcgggtcgagtacatggaagaggaaaagaaaacctggggcaccgtgttcaagaccctgaagtccctgtacaagacccacgcctgctacgagtacaaccacatcttcccactgctcgaaaagtactgcggcttccacgaggacaatatccctcagcttgaggacgtgtcccagttcctgcagacctgcaccggctttagactgaggccagttgccggactgctgagcagcagagattttctcggcggcctggccttcagagtgttccactgtacccagtacatcagacacggcagcaagcccatgtacacccctgagcctgatatctgccacgagctgctgggacatgtgcccctgttcagcgatagaagcttcgcccagttcagccaagagatcggactggcttctctgggagcccctgacgagtacattgagaagctggccaccatctactggttcaccgtggaattcggcctgtgcaagcagggcgacagcatcaaagcttatggcgctggcctgctgtctagcttcggcgagctgcagtactgtctgagcgagaagcctaagctgctgcccctggaactggaaaagaccgccatccagaactacaccgtgaccgagttccagcctctgtactacgtggccgagagcttcaacgacgccaaagaaaaagtgcggaacttcgccgccaccattcctcggcctttcagcgtcagatacgacccctacacacagcggatcgaggtgctggacaacacacagcagctgaaaattctggccgactccatcaacagcgagatcggcatcctgtgcagcgccctgcagaaaatcaagtgatagttaattaagagcatcttaccgccatttattcccatatttgttctgtttttcttgatttgggtatacatttaaatgttaataaaacaaaatggtggggcaatcatttacatttttagggatatgtaattactagttcaggtgtattgccacaagacaaacatgttaagaaactttcccgttatttacgctctgttcctgttaatcaacctctggattacaaaatttgtgaaagattgactgatattcttaactatgttgctccttttacgctgtgtggatatgctgctttatagcctctgtatctagctattgcttcccgtacggctttcgttttctcctccttgtataaatcctggttgctgtctcttttagaggagttgtggcccgttgtccgtcaacgtggcgtggtgtgctctgtgtttgctgacgcaacccccactggctggggcattgccaccacctgtcaactcctttctgggactttcgctttccccctcccgatcgccacggcagaactcatcgccgcctgccttgcccgctgctggacaggggctaggttgctgggcactgataattccgtggtgttgtctgtgccttctagttgccagccatctgttgtttgcccctcccccgtgccttccttgaccctggaaggtgccactcccactgtcctttcctaataaaatgaggaaattgcatcgcattgtctgagtaggtgtcattctattctggggggtggggtggggcaggacagcaagggggaggattgggaagacaatagcaggcatgctggggatgcggtgggctctatggctctagagcatggctacgtagataagtagcatggcgggttaatcattaactacacctgcaggaggaacccctagtgatggagttggccactccctctctgcgcgctcgctcgctcaactgaggccgcccgggcaaagcccgggcgtcgggcgacctttggtcgcccggcctcag

SEQ ID NO: 581 - DNA, 4060 bp, Artificial Sequence
  Description of Artificial Sequence: Synthetic polynucleotide
ctgaggccgcccgggcaaagcccgggcgtcgggcgacctttggtcgcccggcctcagtgagcgagcgagcgcgcagagagggagtggccaactccatcactaggggttccttgtagttaatgattaacccgccatgctacttatcgcggccgcagcaacagatcattctatgggttaatcattaacaacaggttaggcttgtactttggtacattggctcctagttaatcattaacttagcaatgtgcttgtactttggtacatagttacctagttaatcattaacaaacagtatggcttgtactttggtacaagcaacagatcattctatgggcgagaacttgtgcctccccgtgttcctgctctttgtccctctgtcctacttagactaatatttgccttgggtactgcaaacaggaaatgggggagggacaggagtagggcggagggtagcaattggattctgcagtgagagcagagggccagctaagtggtactctcccagagactgtctgactcacgccaccccctccaccttggacacaggacgctgtggtttctgagccaggtacaatgactcctttcggtaagtgcagtggaagctgtacactgcccaggcaaagcgtccgggcagcgtaggcgggcgactcagatcccagccagtggacttagcccctgtttgctcctccgataactggggtgaccttggttaatattcaccagcagcctcccccgttgcccctctggatccactgcttaaatacggacgaggacagggccctgtctcctcagcttcaggcaccaccactgacctgggacagtgaatgtttaaaccgcagccaccatgtccacagctgtgctggagaaccctggcttgggcaggaaactctctgactttggacaggtgagccagggcagcctgagctgctcagttaggggaatttgggcctccagagaaagagatcccaagactgctggtgcttcctggtttcataagctcagtaagaagtctgaattggttggaagctgatgagaatatccaggaagtcaacagacaaatgtcctcaacaattgtttctaagtaggagaacatctgtcctgggtggctttcacaggaatgaatgaccattgctttagggggttggggatctggcctccagaactgccaccaattagctgtgtgtctttggacaagttactgtccctctctgttgtctgtttactcttctgtacactgaaggggttccaatccaggtcttaggattcaaaagcctgtgcatgttccatttttagtactttccacactgtatttctcaatgtctttctgggacattttataaatcatattatatcacctctaaggatctttcagtttgttatatatgtgtctattaagttagattgtgagctcctaaaagataaagcattgtcttattcatctttaaatttctcagagcccaaatagtgcctggaacctagtagttgctcaataaaaggtattgaatttacaggattgaatggtgacatcaatgaataattgaagattccttaagctgataactgacccagtagcatcattgatcatttaattgccctggacttacttattttccaccacactacatatttctgtatagaatatatatagctcattgtattgcaagatttaactagaagaaagagttcatgcttgctttgtccatgtaggtttaacaggaatgaattgctaaactgtggaaaatgttttaaacaaatgcatcttatcctgtaggaaacaagctatattgaagacaactgcaatcaaaatggagccatctccctgatcttctccctgaaggaggaggtgggagccctggccaaggtgctgagactgtttgaggagaatgatgtgaacctgacccacattgagtccagaccctccagactgaagaaggatgagtatgagttcttcacccacctggacaagagatccctgcctgccctgaccaacatcatcaagatcctgagacatgacattggagccacagtgcatgagctgtccagagacaagaagaaggacacagtgccctggttccccagaaccatccaggagctggacagatttgccaaccagatcctgtcctatggagctgagctggatgctgaccaccctggcttcaaggaccctgtgtacagggccagaagaaagcagtttgctgacattgcctacaactacagacatggccagcccatccccagagtggagtacatggaggaggagaagaagacctggggcacagtgttcaagaccctgaagtccctgtacaagacccatgcctgctatgagtacaaccacatcttccccctgctggagaagtactgtggcttccatgaggacaacatcccccagctggaggatgtgtcccagttcctgcagacctgcacaggcttcagactgagacctgtggctggcctgctgtcctccagagacttcctgggaggcctggccttcagagtgttccactgcacccagtacatcagacatggctccaagcccatgtacacccctgagcctgacatctgccatgagctgctgggccatgtgcccctgttctctgacagatcctttgcccagttctcccaggagattggcctggcctccctgggagcccctgatgagtacattgagaagctggccaccatctactggttcacagtggagtttggcctgtgcaagcagggagactccatcaaggcctatggagctggcctgctgtcctcctttggagagctgcagtactgcctgtctgagaagcccaagctgctgcccctggagctggagaagacagccatccagaactacacagtgacagagttccagcccctgtactatgtggctgagtccttcaatgatgccaaggagaaggtcagaaactttgctgccaccatccccagacccttctctgtgagatatgacccctacacccagagaattgaggtgctggacaacacccagcagctgaagatcctggctgactccatcaactctgagattggcatcctgtgctctgccctgcagaagatcaagtaaaccttaattaagagcatcttaccgccatttattcccatatttgttctgtttttcttgatttgggtatacatttaaatgttaataaaacaaaatggtggggcaatcatttacatttttagggatatgtaattactagttcaggtgtattgccacaagacaaacatgttaagaaactttcccgttatttacgctctgttcctgttaatcaacctctggattacaaaatttgtgaaagattgactgatattcttaactatgttgctccttttacgctgtgtggatatgctgctttatagcctctgtatctagctattgcttcccgtacggctttcgttttctcctccttgtataaatcctggttgctgtctcttttagaggagttgtggcccgttgtccgtcaacgtggcgtggtgtgctctgtgtttgctgacgcaacccccactggctggggcattgccaccacctgtcaactcctttctgggactttcgctttccccctcccgatcgccacggcagaactcatcgccgcctgccttgcccgctgctggacaggggctaggttgctgggcactgataattccgtggtgttgtctgtgccttctagttgccagccatctgttgtttgcccctcccccgtgccttccttgaccctggaaggtgccactcccactgtcctttcctaataaaatgaggaaattgcatcgcattgtctgagtaggtgtcattctattctggggggtggggtggggcaggacagcaagggggaggattgggaagacaatagcaggcatgctggggatgcggtgggctctatggctctagagcatggctacgtagataagtagcatggcgggttaatcattaactacacctgcaggaggaacccctagtgatggagttggccactccctctctgcgcgctcgctcgctcaactgaggccgcccgggcaaagcccgggcgtcgggcgacctttggtcgcccggcctcag

SEQ ID NO: 582 - DNA, 4041 bp, Artificial Sequence
  Description of Artificial Sequence: Synthetic polynucleotide
ctgaggccgcccgggcaaagcccgggcgtcgggcgacctttggtcgcccggcctcagtgagcgagcgagcgcgcagagagggagtggccaactccatcactaggggttccttgtagttaatgattaacccgccatgctacttatcgcggccgcgggggaggctgctggtaaacattaaccaaggtcaccccagttatcagaggagcaaacaggggcaaagtccaccgggggaggctgctggtaaacattaaccaaggtcaccccagttatcagaggagcaaacaggggcaaagtccaccgggggaggctgctggtaaacattaaccaaggtcaccccagttatcagaggagcaaacaggggcaaagtccacggtacccactgggaggatgttgagtaagatggaaaactactgatgacccttgcagagacagagtattaggacatgtttgaacaggggccgggcgatcagcaggtagctctagaggatccccgtctgtctgcacatttcgtagagcgagtgttccgatactctaatctccctaggcaaggttcatatttgtgtaggttacttattctccttttgttgactaagtcaataatcagaatcagcaggtttggagtcagcttggcagggatcagcagcctgggttggaaggagggggtataaaagccccttcaccaggagaagccgtcacacagatccacaagctcctgaagaggtaagggtttaagggatggttggttggtggggtattaatgtttaattacctggagcacctgcctgaaatcactttttttcaggttgggtttaaaccgcagccaccatgtccacagctgtgctggagaaccctggcttgggcaggaaactctctgactttggacaggtgagccagggcagcctgagctgctcagttaggggaatttgggcctccagagaaagagatcccaagactgctggtgcttcctggtttcataagctcagtaagaagtctgaattggttggaagctgatgagaatatccaggaagtcaacagacaaatgtcctcaacaattgtttctaagtaggagaacatctgtcctgggtggctttcacaggaatgaatgaccattgctttagggggttggggatctggcctccagaactgccaccaattagctgtgtgtctttggacaagttactgtccctctctgttgtctgtttactcttctgtacactgaaggggttccaatccaggtcttaggattcaaaagcctgtgcatgttccatttttagtactttccacactgtatttctcaatgtctttctgggacattttataaatcatattatatcacctctaaggatctttcagtttgttatatatgtgtctattaagttagattgtgagctcctaaaagataaagcattgtcttattcatctttaaatttctcagagcccaaatagtgcctggaacctagtagttgctcaataaaaggtattgaatttacaggattgaatggtgacatcaatgaataattgaagattccttaagctgataactgacccagtagcatcattgatcatttaattgccctggacttacttattttccaccacactacatatttctgtatagaatatatatagctcattgtattgcaagatttaactagaagaaagagttcatgcttgctttgtccatgtaggtttaacaggaatgaattgctaaactgtggaaaatgttttaaacaaatgcatcttatcctgtaggaaacaagctatattgaagacaactgcaatcaaaatggagccatctccctgatcttctccctgaaggaggaggtgggagccctggccaaggtgctgagactgtttgaggagaatgatgtgaacctgacccacattgagtccagaccctccagactgaagaaggatgagtatgagttcttcacccacctggacaagagatccctgcctgccctgaccaacatcatcaagatcctgagacatgacattggagccacagtgcatgagctgtccagagacaagaagaaggacacagtgccctggttccccagaaccatccaggagctggacagatttgccaaccagatcctgtcctatggagctgagctggatgctgaccaccctggcttcaaggaccctgtgtacagggccagaagaaagcagtttgctgacattgcctacaactacagacatggccagcccatccccagagtggagtacatggaggaggagaagaagacctggggcacagtgttcaagaccctgaagtccctgtacaagacccatgcctgctatgagtacaaccacatcttccccctgctggagaagtactgtggcttccatgaggacaacatcccccagctggaggatgtgtcccagttcctgcagacctgcacaggcttcagactgagacctgtggctggcctgctgtcctccagagacttcctgggaggcctggccttcagagtgttccactgcacccagtacatcagacatggctccaagcccatgtacacccctgagcctgacatctgccatgagctgctgggccatgtgcccctgttctctgacagatcctttgcccagttctcccaggagattggcctggcctccctgggagcccctgatgagtacattgagaagctggccaccatctactggttcacagtggagtttggcctgtgcaagcagggagactccatcaaggcctatggagctggcctgctgtcctcctttggagagctgcagtactgcctgtctgagaagcccaagctgctgcccctggagctggagaagacagccatccagaactacacagtgacagagttccagcccctgtactatgtggctgagtccttcaatgatgccaaggagaaggtcagaaactttgctgccaccatccccagacccttctctgtgagatatgacccctacacccagagaattgaggtgctggacaacacccagcagctgaagatcctggctgactccatcaactctgagattggcatcctgtgctctgccctgcagaagatcaagtaaaccttaattaagagcatcttaccgccatttattcccatatttgttctgtttttcttgatttgggtatacatttaaatgttaataaaacaaaatggtggggcaatcatttacatttttagggatatgtaattactagttcaggtgtattgccacaagacaaacatgttaagaaactttcccgttatttacgctctgttcctgttaatcaacctctggattacaaaatttgtgaaagattgactgatattcttaactatgttgctccttttacgctgtgtggatatgctgctttatagcctctgtatctagctattgcttcccgtacggctttcgttttctcctccttgtataaatcctggttgctgtctcttttagaggagttgtggcccgttgtccgtcaacgtggcgtggtgtgctctgtgtttgctgacgcaacccccactggctggggcattgccaccacctgtcaactcctttctgggactttcgctttccccctcccgatcgccacggcagaactcatcgccgcctgccttgcccgctgctggacaggggctaggttgctgggcactgataattccgtggtgttgtctgtgccttctagttgccagccatctgttgtttgcccctcccccgtgccttccttgaccctggaaggtgccactcccactgtcctttcctaataaaatgaggaaattgcatcgcattgtctgagtaggtgtcattctattctggggggtggggtggggcaggacagcaagggggaggattgggaagacaatagcaggcatgctggggatgcggtgggctctatggctctagagcatggctacgtagataagtagcatggcgggttaatcattaactacacctgcaggaggaacccctagtgatggagttggccactccctctctgcgcgctcgctcgctcaactgaggccgcccgggcaaagcccgggcgtcgggcgacctttggtcgcccggcctcag

SEQ ID NO: 583 - DNA, 3785 bp, Artificial Sequence
  Description of Artificial Sequence: Synthetic polynucleotide
ctgaggccgcccgggcaaagcccgggcgtcgggcgacctttggtcgcccggcctcagtgagcgagcgagcgcgcagagagggagtggccaactccatcactaggggttccttgtagttaatgattaacccgccatgctacttatcgcggccgcgggggaggctgctggtaaacattaaccaaggtcaccccagttatcagaggagcaaacaggggcaaagtccacacgcgtggtaccgtctgtctgcacatttcgtagagcgagtgttccgatactctaatctccctaggcaaggttcatatttgtgtaggttacttattctccttttgttgactaagtcaataatcagaatcagcaggtttggagtcagcttggcagggatcagcagcctgggttggaaggagggggtataaaagccccttcaccaggagaagccgtcacacagatccacaagctcctgaagaggtaagggtttaagggatggttggttggtggggtattaatgtttaattacctggagcacctgcctgaaatcactttttttcaggttggtttaaaccgcagccaccatgtccacagctgtgctggagaaccctggcttgggcaggaaactctctgactttggacaggtgagccagggcagcctgagctgctcagttaggggaatttgggcctccagagaaagagatcccaagactgctggtgcttcctggtttcataagctcagtaagaagtctgaattggttggaagctgatgagaatatccaggaagtcaacagacaaatgtcctcaacaattgtttctaagtaggagaacatctgtcctgggtggctttcacaggaatgaatgaccattgctttagggggttggggatctggcctccagaactgccaccaattagctgtgtgtctttggacaagttactgtccctctctgttgtctgtttactcttctgtacactgaaggggttccaatccaggtcttaggattcaaaagcctgtgcatgttccatttttagtactttccacactgtatttctcaatgtctttctgggacattttataaatcatattatatcacctctaaggatctttcagtttgttatatatgtgtctattaagttagattgtgagctcctaaaagataaagcattgtcttattcatctttaaatttctcagagcccaaatagtgcctggaacctagtagttgctcaataaaaggtattgaatttacaggattgaatggtgacatcaatgaataattgaagattccttaagctgataactgacccagtagcatcattgatcatttaattgccctggacttacttattttccaccacactacatatttctgtatagaatatatatagctcattgtattgcaagatttaactagaagaaagagttcatgcttgctttgtccatgtaggtttaacaggaatgaattgctaaactgtggaaaatgttttaaacaaatgcatcttatcctgtaggaaacaagctatattgaagacaactgcaatcaaaatggagccatctccctgatcttctccctgaaggaggaggtgggagccctggccaaggtgctgagactgtttgaggagaatgatgtgaacctgacccacattgagtccagaccctccagactgaagaaggatgagtatgagttcttcacccacctggacaagagatccctgcctgccctgaccaacatcatcaagatcctgagacatgacattggagccacagtgcatgagctgtccagagacaagaagaaggacacagtgccctggttccccagaaccatccaggagctggacagatttgccaaccagatcctgtcctatggagctgagctggatgctgaccaccctggcttcaaggaccctgtgtacagggccagaagaaagcagtttgctgacattgcctacaactacagacatggccagcccatccccagagtggagtacatggaggaggagaagaagacctggggcacagtgttcaagaccctgaagtccctgtacaagacccatgcctgctatgagtacaaccacatcttccccctgctggagaagtactgtggcttccatgaggacaacatcccccagctggaggatgtgtcccagttcctgcagacctgcacaggcttcagactgagacctgtggctggcctgctgtcctccagagacttcctgggaggcctggccttcagagtgttccactgcacccagtacatcagacatggctccaagcccatgtacacccctgagcctgacatctgccatgagctgctgggccatgtgcccctgttctctgacagatcctttgcccagttctcccaggagattggcctggcctccctgggagcccctgatgagtacattgagaagctggccaccatctactggttcacagtggagtttggcctgtgcaagcagggagactccatcaaggcctatggagctggcctgctgtcctcctttggagagctgcagtactgcctgtctgagaagcccaagctgctgcccctggagctggagaagacagccatccagaactacacagtgacagagttccagcccctgtactatgtggctgagtccttcaatgatgccaaggagaaggtcagaaactttgctgccaccatccccagacccttctctgtgagatatgacccctacacccagagaattgaggtgctggacaacacccagcagctgaagatcctggctgactccatcaactctgagattggcatcctgtgctctgccctgcagaagatcaagtaaaccttaattaagagcatcttaccgccatttattcccatatttgttctgtttttcttgatttgggtatacatttaaatgttaataaaacaaaatggtggggcaatcatttacatttttagggatatgtaattactagttcaggtgtattgccacaagacaaacatgttaagaaactttcccgttatttacgctctgttcctgttaatcaacctctggattacaaaatttgtgaaagattgactgatattcttaactatgttgctccttttacgctgtgtggatatgctgctttatagcctctgtatctagctattgcttcccgtacggctttcgttttctcctccttgtataaatcctggttgctgtctcttttagaggagttgtggcccgttgtccgtcaacgtggcgtggtgtgctctgtgtttgctgacgcaacccccactggctggggcattgccaccacctgtcaactcctttctgggactttcgctttccccctcccgatcgccacggcagaactcatcgccgcctgccttgcccgctgctggacaggggctaggttgctgggcactgataattccgtggtgttgtctgtgccttctagttgccagccatctgttgtttgcccctcccccgtgccttccttgaccctggaaggtgccactcccactgtcctttcctaataaaatgaggaaattgcatcgcattgtctgagtaggtgtcattctattctggggggtggggtggggcaggacagcaagggggaggattgggaagacaatagcaggcatgctggggatgcggtgggctctatggctctagagcatggctacgtagataagtagcatggcgggttaatcattaactacacctgcaggaggaacccctagtgatggagttggccactccctctctgcgcgctcgctcgctcaactgaggccgcccgggcaaagcccgggcgtcgggcgacctttggtcgcccggcctcag

SEQ ID NO: 584 - DNA, 4015 bp, Artificial Sequence
  Description of Artificial Sequence: Synthetic polynucleotide
ctgaggccgcccgggcaaagcccgggcgtcgggcgacctttggtcgcccggcctcagtgagcgagcgagcgcgcagagagggagtggccaactccatcactaggggttccttgtagttaatgattaacccgccatgctacttatcgcggccgcagcaacagatcattctatgggttaatcattaacaacaggttaggttaatcattaacttggctcctagttaatcattaacaaacagtatggttaatcattaacaaattctggggttaatcattaactagttacctagcgagaacttgtgcctccccgtgttcctgctctttgtccctctgtcctacttagactaatatttgccttgggtactgcaaacaggaaatgggggagggacaggagtagggcggagggtagcaattggattctgcagtgagagcagagggccagctaagtggtactctcccagagactgtctgactcacgccaccccctccaccttggacacaggacgctgtggtttctgagccaggtacaatgactcctttcggtaagtgcagtggaagctgtacactgcccaggcaaagcgtccgggcagcgtaggcgggcgactcagatcccagccagtggacttagcccctgtttgctcctccgataactggggtgaccttggttaatattcaccagcagcctcccccgttgcccctctggatccactgcttaaatacggacgaggacagggccctgtctcctcagcttcaggcaccaccactgacctgggacagtgaatgtttaaaccgcagccaccatgtccacagctgtgctggagaaccctggcttgggcaggaaactctctgactttggacaggtgagccagggcagcctgagctgctcagttaggggaatttgggcctccagagaaagagatcccaagactgctggtgcttcctggtttcataagctcagtaagaagtctgaattggttggaagctgatgagaatatccaggaagtcaacagacaaatgtcctcaacaattgtttctaagtaggagaacatctgtcctgggtggctttcacaggaatgaatgaccattgctttagggggttggggatctggcctccagaactgccaccaattagctgtgtgtctttggacaagttactgtccctctctgttgtctgtttactcttctgtacactgaaggggttccaatccaggtcttaggattcaaaagcctgtgcatgttccatttttagtactttccacactgtatttctcaatgtctttctgggacattttataaatcatattatatcacctctaaggatctttcagtttgttatatatgtgtctattaagttagattgtgagctcctaaaagataaagcattgtcttattcatctttaaatttctcagagcccaaatagtgcctggaacctagtagttgctcaataaaaggtattgaatttacaggattgaatggtgacatcaatgaataattgaagattccttaagctgataactgacccagtagcatcattgatcatttaattgccctggacttacttattttccaccacactacatatttctgtatagaatatatatagctcattgtattgcaagatttaactagaagaaagagttcatgcttgctttgtccatgtaggtttaacaggaatgaattgctaaactgtggaaaatgttttaaacaaatgcatcttatcctgtaggaaacaagctatattgaagacaactgcaatcaaaatggagccatctccctgatcttctccctgaaggaggaggtgggagccctggccaaggtgctgagactgtttgaggagaatgatgtgaacctgacccacattgagtccagaccctccagactgaagaaggatgagtatgagttcttcacccacctggacaagagatccctgcctgccctgaccaacatcatcaagatcctgagacatgacattggagccacagtgcatgagctgtccagagacaagaagaaggacacagtgccctggttccccagaaccatccaggagctggacagatttgccaaccagatcctgtcctatggagctgagctggatgctgaccaccctggcttcaaggaccctgtgtacagggccagaagaaagcagtttgctgacattgcctacaactacagacatggccagcccatccccagagtggagtacatggaggaggagaagaagacctggggcacagtgttcaagaccctgaagtccctgtacaagacccatgcctgctatgagtacaaccacatcttccccctgctggagaagtactgtggcttccatgaggacaacatcccccagctggaggatgtgtcccagttcctgcagacctgcacaggcttcagactgagacctgtggctggcctgctgtcctccagagacttcctgggaggcctggccttcagagtgttccactgcacccagtacatcagacatggctccaagcccatgtacacccctgagcctgacatctgccatgagctgctgggccatgtgcccctgttctctgacagatcctttgcccagttctcccaggagattggcctggcctccctgggagcccctgatgagtacattgagaagctggccaccatctactggttcacagtggagtttggcctgtgcaagcagggagactccatcaaggcctatggagctggcctgctgtcctcctttggagagctgcagtactgcctgtctgagaagcccaagctgctgcccctggagctggagaagacagccatccagaactacacagtgacagagttccagcccctgtactatgtggctgagtccttcaatgatgccaaggagaaggtcagaaactttgctgccaccatccccagacccttctctgtgagatatgacccctacacccagagaattgaggtgctggacaacacccagcagctgaagatcctggctgactccatcaactctgagattggcatcctgtgctctgccctgcagaagatcaagtaaaccttaattaagagcatcttaccgccatttattcccatatttgttctgtttttcttgatttgggtatacatttaaatgttaataaaacaaaatggtggggcaatcatttacatttttagggatatgtaattactagttcaggtgtattgccacaagacaaacatgttaagaaactttcccgttatttacgctctgttcctgttaatcaacctctggattacaaaatttgtgaaagattgactgatattcttaactatgttgctccttttacgctgtgtggatatgctgctttatagcctctgtatctagctattgcttcccgtacggctttcgttttctcctccttgtataaatcctggttgctgtctcttttagaggagttgtggcccgttgtccgtcaacgtggcgtggtgtgctctgtgtttgctgacgcaacccccactggctggggcattgccaccacctgtcaactcctttctgggactttcgctttccccctcccgatcgccacggcagaactcatcgccgcctgccttgcccgctgctggacaggggctaggttgctgggcactgataattccgtggtgttgtctgtgccttctagttgccagccatctgttgtttgcccctcccccgtgccttccttgaccctggaaggtgccactcccactgtcctttcctaataaaatgaggaaattgcatcgcattgtctgagtaggtgtcattctattctggggggtggggtggggcaggacagcaagggggaggattgggaagacaatagcaggcatgctggggatgcggtgggctctatggctctagagcatggctacgtagataagtagcatggcgggttaatcattaactacacctgcaggaggaacccctagtgatggagttggccactccctctctgcgcgctcgctcgctcaactgaggccgcccgggcaaagcccgggcgtcgggcgacctttggtcgcccggcctcag

SEQ ID NO: 585 - DNA, 1362 bp, Artificial Sequence
  Description of Artificial Sequence: Synthetic polynucleotide
atggccgctgtggtgctggaaaatggcgtgctgagcagaaagctgagcgacttcggccaagagacaagctacatcgaggacaacagcaaccagaacggcgctgtgtccctgatcttcagcctgaaagaagaagtgggcgccctggccaaggtgctgagactgtttgaggaaaacgagatcaacctgacgcacatcgagagcagacccagcagactgaacaaggacgagtacgagttcttcacctacctggacaagagaagcaagcccgtgctgggcagcatcatcaagagcctgagaaacgacatcggcgccaccgtgcacgagctgagcagggacaaagaaaagaacaccgtgccatggttccccaggaccatccaagagctggacagattcgccaaccagatcctgtcttacggcgccgagctggacgctgatcaccctggctttaaggaccccgtgtacagagccagaagaaagcagttcgccgatatcgcctacaactacagacacggccagcctattcctagagtcgagtacaccgaggaagagagaaagacctggggcaccgtgttcagaaccctgaaggccctgtacaagacccacgcctgctacgagcacaaccacatcttcccactgctcgaaaagtactgcggcttccgcgaggataacatccctcagcttgaggacgtgtcccagttcctgcagacctgcacaggcttcagactgaggccagttgctggcctgctgtccagcagagattttctcggcggcctggccttcagagtgttccactgtacccagtacatcaggcacggcagcaagcccatgtacacccctgagcctgacatctgccacgagctgctgggacatgtgcctctgttcagcgacagaagcttcgcccagttcagccaagagatcggcctggctagtctgggcgctcctgatgagtacatcgagaagctggccaccatctactggttcaccgtggaattcggcctgtgcaaagagggcgacagcatcaaggcttatggcgccggactgctgtctagctttggcgagctgcagtactgtctgagcgacaagcctaagctgctgcccctggaactggaaaagaccgcctgccaagagtacacagtgaccgagttccagcctctgtactacgtggccgagagcttcaacgacgccaaagaaaaagtgcggaccttcgccgctacaatccccagacctttcagcgtcagatacgacccctacacacagcgcgtggaagtgctggacaacacacagcagctgaagattctggccgactccatcaacagcgaagtgggcatcctgtgtcacgccctgcagaaaatcaagagctga

SEQ ID NO: 586 - DNA, 73 bp, Artificial Sequence
  Description of Artificial Sequence: Synthetic oligonucleotide
cgggggaggctgctggtaaacattaaccaaggtcaccccagttatcagaggagcaaacaggggcaaagtccac

SEQ ID NO: 587 - DNA, 218 bp, Artificial Sequence
  Description of Artificial Sequence: Synthetic polynucleotide
gggggaggctgctggtaaacattaaccaaggtcaccccagttatcagaggagcaaacaggggcaaagtccaccgggggaggctgctggtaaacattaaccaaggtcaccccagttatcagaggagcaaacaggggcaaagtccaccgggggaggctgctggtaaacattaaccaaggtcaccccagttatcagaggagcaaacaggggcaaagtccac

SEQ ID NO: 588 - DNA, 70 bp, Artificial Sequence
  Description of Artificial Sequence: Synthetic oligonucleotide
gggggaagctactggtgaatattaaccaaggtcacccagttatcagggagcaaacaggagctaagtccat

SEQ ID NO: 589 - DNA, 212 bp, Artificial Sequence
  Description of Artificial Sequence: Synthetic polynucleotide
aggggaagctactggtgaatattaaccaaggtcacccagttatcagggagcaaacaggagctaagtccatagggggaagctactggtgaatattaaccaaggtcacccagttatcagggagcaaacaggagctaagtccatagggggaagctactggtgaatattaaccaaggtcacccagttatcagggagcaaacaggagctaagtccat

SEQ ID NO: 590 - DNA, 69 bp, Artificial Sequence
  Description of Artificial Sequence: Synthetic oligonucleotide
ggaggctgttggtgaatattaaccaaggtcaccccagttatcggaggagcaaacaagggctaagtccac

SEQ ID NO: 591 - DNA, 209 bp, Artificial Sequence
  Description of Artificial Sequence: Synthetic polynucleotide
ggaggctgttggtgaatattaaccaaggtcacctcagttatcggaggagcaaacaagggctaagtccaccggaggctgttggtgaatattaaccaaggtcacctcagttatcggaggagcaaacaagggctaagtccaccggaggctgttggtgaatattaaccaaggtcacctcagttatcggaggagcaaacaagggctaagtccac

SEQ ID NO: 592 - DNA, 211 bp, Artificial Sequence
  Description of Artificial Sequence: Synthetic polynucleotide
aggaggctgttggtgaatattaaccaaggtcacctcagttatcagaggagcaaacaagggctaagtccacaggaggctgttggtgaatattaaccaaggtcacctcagttatcagaggagcaaacaagggctaagtccacaggaggctgttggtgaatattaaccaaggtcacctcagttatcagaggagcaaacaagggctaagtccaca

SEQ ID NO: 593 - DNA, 218 bp, Artificial Sequence
  Description of Artificial Sequence: Synthetic polynucleotide
gggggaggctgctggtgaatattaaccaaggtcaccccagttatcggaggagcaaacaggggctaagtccacagggggaggctgctggtgaatattaaccaaggtcaccccagttatcggaggagcaaacaggggctaagtccacagggggaggctgctggtgaatattaaccaaggtcaccccagttatcggaggagcaaacaggggctaagtccac

SEQ ID NO: 594 - DNA, 354 bp, Artificial Sequence
  Description of Artificial Sequence: Synthetic polynucleotide
aggggaagctactggtgaatattaaccaaggtcacccagttatcagggagcaaacaggagctaagtccatagggggaagctactggtgaatattaaccaaggtcacccagttatcagggagcaaacaggagctaagtccatagggggaagctactggtgaatattaaccaaggtcacccagttatcagggagcaaacaggagctaagtccatagggggaagctactggtgaatattaaccaaggtcacccagttatcagggagcaaacaggagctaagtccatagggggaagctactggtgaatattaaccaaggtcacccagttatcagggagcaaacaggagctaagtccat

SEQ ID NO: 595 - DNA, 349 bp, Artificial Sequence
  Description of Artificial Sequence: Synthetic polynucleotide
ggaggctgttggtgaatattaaccaaggtcacctcagttatcggaggagcaaacaagggctaagtccaccggaggctgttggtgaatattaaccaaggtcacctcagttatcggaggagcaaacaagggctaagtccaccggaggctgttggtgaatattaaccaaggtcacctcagttatcggaggagcaaacaagggctaagtccaccggaggctgttggtgaatattaaccaaggtcacctcagttatcggaggagcaaacaagggctaagtccaccggaggctgttggtgaatattaaccaaggtcacctcagttatcggaggagcaaacaagggctaagtccac

SEQ ID NO: 596 - DNA, 238 bp, Artificial Sequence
  Description of Artificial Sequence: Synthetic polynucleotide
gggggaggctgctggtgaatattaaccaaggtcaccccagttatcggaggagcaaacaggggctaagtccaccattctgctttgggggaggctgctggtgaatattaaccaaggtcaccccagttatcggaggagcaaacaggggctaagtccacttgattaagaagggggaggctgctggtgaatattaaccaaggtcaccccagttatcggaggagcaaacaggggctaagtccac

SEQ ID NO: 597 - DNA, 276 bp, Artificial Sequence
  Description of Artificial Sequence: Synthetic polynucleotide
gggggaggctgctggtgaatattaaccaaggtcaccccagttatcggaggagcaaacaggggctaagtccacatagaagaatttcttacattgtgtgaacctgggggaggctgctggtgaatattaaccaaggtcaccccagttatcggaggagcaaacaggggctaagtccacattgaagtgcaaagtcactaatattaagcagggggaggctgctggtgaatattaaccaaggtcaccccagttatcggaggagcaaacaggggctaagtccac

SEQ ID NO: 598 - DNA, 276 bp, Artificial Sequence
  Description of Artificial Sequence: Synthetic polynucleotide
gggggaggctgctggtgaatattaaccaaggtcaccccagttatcggaggagcaaacaggggctaagtccacattaactattgggactttggttaacaacaagggggaggctgctggtgaatattaaccaaggtcaccccagttatcggaggagcaaacaggggctaagtccaccagagacttattgtttacagctaactatctgggggaggctgctggtgaatattaaccaaggtcaccccagttatcggaggagcaaacaggggctaagtccac

SEQ ID NO: 599 - DNA, 220 bp, Artificial Sequence
  Description of Artificial Sequence: Synthetic polynucleotide
gggggaggctgctggtgaatattaaccaaggtcaccccagttatcggaggagcaaacaggggctaagtccacctgggggaggctgctggtgaatattaaccaaggtcaccccagttatcggaggagcaaacaggggctaagtccaccagggggaggctgctggtgaatattaaccaaggtcaccccagttatcggaggagcaaacaggggctaagtccac

SEQ ID NO: 600 - DNA, 220 bp, Artificial Sequence
  Description of Artificial Sequence: Synthetic polynucleotide
gggggaggctgctggtgaatattaaccaaggtcaccccagttatcggaggagcaaacaggggctaagtccacctgggggaggctgctggtgaatattaaccaaggtcaccccagttatcggaggagcaaacaggggctaagtccacttgggggaggctgctggtgaatattaaccaaggtcaccccagttatcggaggagcaaacaggggctaagtccac

SEQ ID NO: 601 - DNA, 220 bp, Artificial Sequence
  Description of Artificial Sequence: Synthetic polynucleotide
gggggaggctgctggtgaatattaaccaaggtcaccccagttatcggaggagcaaacaggggctaagtccacctgggggaggctgctggtgaatattaaccaaggtcaccccagttatcggaggagcaaacaggggctaagtccacaagggggaggctgctggtgaatattaaccaaggtcaccccagttatcggaggagcaaacaggggctaagtccac

SEQ ID NO: 602 - DNA, 556 bp, Artificial Sequence
  Description of Artificial Sequence: Synthetic polynucleotide
aggggaagctactggtgaatattaaccaaggtcacccagttatcagggagcaaacaggagctaagtccatagggggaagctactggtgaatattaaccaaggtcacccagttatcagggagcaaacaggagctaagtccatagggggaagctactggtgaatattaaccaaggtcacccagttatcagggagcaaacaggagctaagtccatggtacccactgggaggatgttgagtaagatggaaaactactgatgacccttgcagagacagagtattaggacatgtttgaacaggggccgggcgatcagcaggtagctctagaggatccccgtctgtctgcacatttcgtagagcgagtgttccgatactctaatctccctaggcaaggttcatatttgtgtaggttacttattctccttttgttgactaagtcaataatcagaatcagcaggtttggagtcagcttggcagggatcagcagcctgggttggaaggagggggtataaaagccccttcaccaggagaagccgtcacacagatccacaagctcctg

SEQ ID NO: 603 - DNA, 553 bp, Artificial Sequence
  Description of Artificial Sequence: Synthetic polynucleotide
ggaggctgttggtgaatattaaccaaggtcacctcagttatcggaggagcaaacaagggctaagtccaccggaggctgttggtgaatattaaccaaggtcacctcagttatcggaggagcaaacaagggctaagtccaccggaggctgttggtgaatattaaccaaggtcacctcagttatcggaggagcaaacaagggctaagtccacggtacccactgggaggatgttgagtaagatggaaaactactgatgacccttgcagagacagagtattaggacatgtttgaacaggggccgggcgatcagcaggtagctctagaggatccccgtctgtctgcacatttcgtagagcgagtgttccgatactctaatctccctaggcaaggttcatatttgtgtaggttacttattctccttttgttgactaagtcaataatcagaatcagcaggtttggagtcagcttggcagggatcagcagcctgggttggaaggagggggtataaaagccccttcaccaggagaagccgtcacacagatccacaagctcctg

SEQ ID NO: 604 - DNA, 1125 bp, Artificial Sequence
  Description of Artificial Sequence: Synthetic polynucleotide
aggctcagaggcacacaggagtttctgggctcaccctgcccccttccaacccctcagttcccatcctccagcagctgtttgtgtgctgcctctgaagtccacactgaacaaacttcagcctactcatgtccctaaaatgggcaaacattgcaagcagcaaacagcaaacacacagccctccctgcctgctgaccttggagctggggcagaggtcagagacctctctgggcccatgccacctccaacatccacttgaccccttggaatttcagtggagaggagcagaggttgtcctggtgtggtttaggtagtgtgagagggtccaggttcaaaaccacttgctgggtggggagttgtcagtaagtggctatgccccaaccctgaagcctgtttccccatctgtacaatggaaatgataaagacccccatctgatagggtttttgtggcaaataaacatttggtttttttgttttgttttgttttgttttttgagatggaggtttgctctgtggcccaggctggagtgcagtgacacaatctcatctcaccacaaccttcccctgcctcagcctcccaagtagctgggattacaagcatgtgccaccacacctggctaattttctatttttagtagagatgggtttctccatgttggtcagcctcagcctcccaagtaactgggattacaggcctgtgccaccacacctggctaattttttctatttttgacagggatggggtttcaccatgttggtcaggctggtctagaggtactggatcttgctaccagtggaacagccactaaggattctgcagtgagagcagagggccagctaagtggtactctcccagagactgtctgactcacgccaccccctccaccttggacacaggacgctgtggtttctgagccaggtacaatgactcctttcggtaagtgcagtggaagctgtacactgcccaggcaaagcgtccgggcagcgtaggcgggcgactcagatcccagccagtggacttagcccctgtttgctcctccgataactggggtgaccttggttaatattcaccagcagcctcccccgttgcccctctggatccactgcttaaatacggacgaggacagg

SEQ ID NO: 605 - DNA, 8 bp, Artificial Sequence
  Description of Artificial Sequence: Synthetic oligonucleotide
atcgatcg

SEQ ID NO: 606 - DNA, 8 bp, Artificial Sequence
  Description of Artificial Sequence: Synthetic oligonucleotide
cgatcgat

SEQ ID NO: 607 - DNA, 8 bp, Artificial Sequence
  Description of Artificial Sequence: Synthetic oligonucleotide
atcgatcg

SEQ ID NO: 608 - DNA, 8 bp, Artificial Sequence
  Description of Artificial Sequence: Synthetic oligonucleotide
atcgatcg

SEQ ID NO: 609-999 - skipped (391 entries)

SEQ ID NO: 1000 - DNA, 92 bp, Artificial Sequence
  Description of Artificial Sequence: Synthetic oligonucleotide
aagaggtaagggtttaagggatggttggttggtggggtattaatgtttaattacctggagcacctgcctgaaatcactttttttcaggttgg

SEQ ID NO: 1001 - DNA, 1125 bp, Artificial Sequence
  Description of Artificial Sequence: Synthetic polynucleotide
aggctcagaggcacacaggagtttctgggctcaccctgcccccttccaacccctcagttcccatcctccagcagctgtttgtgtgctgcctctgaagtccacactgaacaaacttcagcctactcatgtccctaaaatgggcaaacattgcaagcagcaaacagcaaacacacagccctccctgcctgctgaccttggagctggggcagaggtcagagacctctctgggcccatgccacctccaacatccactcgaccccttggaatttcggtggagaggagcagaggttgtcctggcgtggtttaggtagtgtgagagggtccgggttcaaaaccacttgctgggtggggagtcgtcagtaagtggctatgccccgaccccgaagcctgtttccccatctgtacaatggaaatgataaagacgcccatctgatagggtttttgtggcaaataaacatttggtttttttgttttgttttgttttgttttttgagatggaggtttgctctgtggcccaggctggagtgcagtgacacaatctcatctcaccacaaccttcccctgcctcagcctcccaagtagctgggattacaagcatgtgccaccacacctggctaattttctatttttagtagagatgggtttctccatgttggtcagcctcagcctcccaagtaactgggattacaggcctgtgccaccacacctggctaattttttctatttttgacagggatggggtttcaccatgttggtcaggctggtctagaggtactggatcttgctaccagtggaacagccactaaggattctgcagtgagagcagagggccagctaagtggtactctcccagagactgtctgactcacgccaccccctccaccttggacacaggacgctgtggtttctgagccaggtacaatgactcctttcggtaagtgcagtggaagctgtacactgcccaggcaaagcgtccgggcagcgtaggcgggcgactcagatcccagccagtggacttagcccctgtttgctcctccgataactggggtgaccttggttaatattcaccagcagcctcccccgttgcccctctggatccactgcttaaatacggacgaggacagg

SEQ ID NO: 1002 - DNA, 1125 bp, Artificial Sequence
  Description of Artificial Sequence: Synthetic polynucleotide
aggctcagaggcacacaggagtttctgggctcaccctgcccccttccaacccctcagttcccatcctccagcagctgtttgtgtgctgcctctgaagtccacactgaacaaacttcagcctactcatgtccctaaaatgggcaaacattgcaagcagcaaacagcaaacacacagccctccctgcctgctgaccttggagctggggcagaggtcagagacctctctgggcccatgccacctccaacatccactcgaccccttggaatttcagtggagaggagcagaggttgtcctggtgtggtttaggtagtgtgagagggtccaggttcaaaaccacttgctgggtggggagttgtcagtaagtggctatgccccgaccccgaagcctgtttccccatctgtacaatggaaatgataaagacgcccatctgatagggtttttgtggcaaataaacatttggtttttttgttttgttttgttttgttttttgagatggaggtttgctctgtcgcccaggctggagtgcagtgacacaatctcatctcaccacaaccttcccctgcctcagcctcccaagtagctgggattacaagcatgtgccaccacacctggctaattttctatttttagtagagacgggtttctccatgttggtcagcctcagcctcccaagtaactgggattacaggcctgtgccaccacacccggctaattttttctatttttgacagggacggggtttcaccatgttggtcaggctggtctagaggtactggatcttgctaccagtggaacagccactaaggattctgcagtgagagcagagggccagctaagtggtactctcccagagactgtctgactcacgccaccccctccaccttggacacaggacgctgtggtttctgagccaggtacaatgactcctttcggtaagtgcagtggaagctgtacactgcccaggcaaagcgtccgggcagcgtaggcgggcgactcagatcccagccagtggacttagcccctgtttgctcctccgataactggggtgaccttggttaatattcaccagcagcctcccccgttgcccctctggatccactgcttaaatacggacgaggacagg

SEQ ID NO: 1003 - DNA, 1125 bp, Artificial Sequence
  Description of Artificial Sequence: Synthetic polynucleotide
aggctcagaggcacacaggagtttctgggctcaccctgcccccttccaacccctcagttcccatcctccagcagctgtttgtgtgctgcctctgaagtccacactgaacaaacttcagcctactcatgtccctaaaatgggcaaacattgcaagcagcaaacagcaaacacacagccctccctgcctgctgaccttggagctggggcagaggtcagagacctctctgggcccatgccacctccaacatccacttgaccccttggaatttcggtggagaggagcagaggttgtcctggcgtggtttaggtagtgtgagagggtccgggttcaaaaccacttgctgggtggggagtcgtcagtaagtggctatgccccaaccctgaagcctgtttccccatctgtacaatggaaatgataaagacccccatctgatagggtttttgtggcaaataaacatttggtttttttgttttgttttgttttgttttttgagatggaggtttgctctgtcgcccaggctggagtgcagtgacacaatctcatctcaccacaaccttcccctgcctcagcctcccaagtagctgggattacaagcatgtgccaccacacctggctaattttctatttttagtagagacgggtttctccatgttggtcagcctcagcctcccaagtaactgggattacaggcctgtgccaccacacccggctaattttttctatttttgacagggacggggtttcaccatgttggtcaggctggtctagaggtactggatcttgctaccagtggaacagccactaaggattctgcagtgagagcagagggccagctaagtggtactctcccagagactgtctgactcacgccaccccctccaccttggacacaggacgctgtggtttctgagccaggtacaatgactcctttcggtaagtgcagtggaagctgtacactgcccaggcaaagcgtccgggcagcgtaggcgggcgactcagatcccagccagtggacttagcccctgtttgctcctccgataactggggtgaccttggttaatattcaccagcagcctcccccgttgcccctctggatccactgcttaaatacggacgaggacagg

SEQ ID NO: 1004 - DNA, 1125 bp, Artificial Sequence
  Description of Artificial Sequence: Synthetic polynucleotide
aggctcagaggcacacaggagtttctgggctcaccctgcccccttccaacccctcagttcccatcctccagcagctgtttgtgtgctgcctctgaagtccacactgaacaaacttcagcctactcatgtccctaaaatgggcaaacattgcaagcagcaaacagcaaacacacagccctccctgcctgctgaccttggagctggggcagaggtcagagacctctctgggcccatgccacctccaacatccactcgaccccttggaatttcggtggagaggagcagaggttgtcctggcgtggtttaggtagtgtgagagggtccgggttcaaaaccacttgctgggtggggagtcgtcagtaagtggctatgccccgaccccgaagcctgtttccccatctgtacaatggaaatgataaagacgcccatctgatagggtttttgtggcaaataaacatttggtttttttgttttgttttgttttgttttttgagatggaggtttgctctgtcgcccaggctggagtgcagtgacacaatctcatctcaccacaaccttcccctgcctcagcctcccaagtagctgggattacaagcatgtgccaccacacctggctaattttctatttttagtagagacgggtttctccatgttggtcagcctcagcctcccaagtaactgggattacaggcctgtgccaccacacccggctaattttttctatttttgacagggacggggtttcaccatgttggtcaggctggtctagaggtactggatcttgctaccagtggaacagccactaaggattctgcagtgagagcagagggccagctaagtggtactctcccagagactgtctgactcatgccaccccctccaccttggacacaggacactgtggtttctgagccaggtacaatgactccttttggtaagtgcagtggaagctgtacactgcccaggcaaagtgtctgggcagcataggcaggtgactcagatcccagccagtggacttagcccctgtttgctcctctgataactggggtgaccttggttaatattcaccagcagcctcccctgttgcccctctggatccactgcttaaatacagacaaggacagg

SEQ ID NO: 1005 - DNA, 1125 bp, Artificial Sequence
  Description of Artificial Sequence: Synthetic polynucleotide
aggctcagaggcacacaggagtttctgggctcaccctgcccccttccaacccctcagttcccatcctccagcagctgtttgtgtgctgcctctgaagtccacactgaacaaacttcagcctactcatgtccctaaaatgggcaaacattgcaagcagcaaacagcaaacacacagccctccctgcctgctgaccttggagctggggcagaggtcagagacctctctgggcccatgccacctccaacatccactcgaccccttggaatttcggtggagaggagcagaggttgtcctggcgtggtttaggtagtgtgagagggtccgggttcaaaaccacttgctgggtggggagtcgtcagtaagtggctatgccccgaccccgaagcctgtttccccatctgtacaatggaaatgataaagacgcccatctgatagggtttttgtggcaaataaacatttggtttttttgttttgttttgttttgttttttgagatggaggtttgctctgtcgcccaggctggagtgcagtgacacaatctcatctcaccacaaccttcccctgcctcagcctcccaagtagctgggattacaagcatgtgccaccacacctggctaattttctatttttagtagagacgggtttctccatgttggtcagcctcagcctcccaagtaactgggattacaggcctgtgccaccacacccggctaattttttctatttttgacagggacggggtttcaccatgttggtcaggctggtctagaggtactggatcttgctaccagtggaacagccactaaggattctgcagtgagagcagagggccagctaagtggtactctcccagagactgtctgactcatgccaccccctccaccttggacacaggacactgtggtttctgagccaggtacaatgactccttttggtaagtgcagtggaagctgtacactgcccaggcaaagtgtccgggcagcgtaggcgggcgactcagatcccagccagtggacttagcccctgtttgctcctccgataactggggtgaccttggttaatattcaccagcagcctcccccgttgcccctctggatccactgcttaaatacggacgaggacagg

SEQ ID NO: 1006 - DNA, 1125 bp, Artificial Sequence
  Description of Artificial Sequence: Synthetic polynucleotide
aggctcagaggcacacaggagtttctgggctcaccctgcccccttccaacccctcagttcccatcctccagcagctgtttgtgtgctgcctctgaagtccacactgaacaaacttcagcctactcatgtccctaaaatgggcaaacattgcaagcagcaaacagcaaacacacagccctccctgcctgctgaccttggagctggggcagaggtcagagacctctctgggcccatgccacctccaacatccactcgaccccttggaatttcggtggagaggagcagaggttgtcctggcgtggtttaggtagtgtgagagggtccgggttcaaaaccacttgctgggtggggagtcgtcagtaagtggctatgccccgaccccgaagcctgtttccccatctgtacaatggaaatgataaagacgcccatctgatagggtttttgtggcaaataaacatttggtttttttgttttgttttgttttgttttttgagatggaggtttgctctgtcgcccaggctggagtgcagtgacacaatctcatctcaccacaaccttcccctgcctcagcctcccaagtagctgggattacaagcatgtgccaccacacctggctaattttctatttttagtagagacgggtttctccatgttggtcagcctcagcctcccaagtaactgggattacaggcctgtgccaccacacccggctaattttttctatttttgacagggacggggtttcaccatgttggtcaggctggtctagaggtactggatcttgctaccagtggaacagccactaaggattctgcagtgagagcagagggccagctaagtggtactctcccagagactgtctgactcacgccaccccctccaccttggacacaggacgctgtggtttctgagccaggtacaatgactcctttcggtaagtgcagtggaagctgtacactgcccaggcaaagcgtccgggcagcgtaggcgggcgactcagatcccagccagtggacttagcccctgtttgctcctctgataactggggtgaccttggttaatattcaccagcagcctcccctgttgcccctctggatccactgcttaaatacggacaaggacagg

SEQ ID NO: 1007 - DNA, 1125 bp, Artificial Sequence
  Description of Artificial Sequence: Synthetic polynucleotide
aggctcagaggcacacaggagtttctgggctcaccctgcccccttccaacccctcagttcccatcctccagcagctgtttgtgtgctgcctctgaagtccacactgaacaaacttcagcctactcatgtccctaaaatgggcaaacattgcaagcagcaaacagcaaacacacagccctccctgcctgctgaccttggagctggggcagaggtcagagacctctctgggcccatgccacctccaacatccactcgaccccttggaatttcggtggagaggagcagaggttgtcctggcgtggtttaggtagtgtgagagggtccgggttcaaaaccacttgctgggtggggagtcgtcagtaagtggctatgccccgaccccgaagcctgtttccccatctgtacaatggaaatgataaagacgcccatctgatagggtttttgtggcaaataaacatttggtttttttgttttgttttgttttgttttttgagatggaggtttgctctgtcgcccaggctggagtgcagtgacacaatctcatctcaccacaaccttcccctgcctcagcctcccaagtagctgggattacaagcatgtgccaccacacctggctaattttctatttttagtagagacgggtttctccatgttggtcagcctcagcctcccaagtaactgggattacaggcctgtgccaccacacccggctaattttttctatttttgacagggacggggtttcaccatgttggtcaggctggtctagaggtactggatcttgctaccagtggaacagccactaaggattctgcagtgagagcagagggccagctaagtggtactctcccagagactgtctgactcacgccaccccctccaccttggacacaggacgctgtggtttctgagccaggtacaatgactcctttcggtaagtgcagtggaagctgtacactgcccaggcaaagcgtctgggcagcataggcaggcgactcagatcccagccagtggacttagcccctgtttgctcctccgataactggggtgaccttggttaatattcaccagcagcctcccccgttgcccctctggatccactgcttaaatacggacgaggacagg

SEQ ID NO: 1008 - DNA, 1125 bp, Artificial Sequence
  Description of Artificial Sequence: Synthetic polynucleotide
aggctcagaggcacacaggagtttctgggctcaccctgcccccttccaacccctcagttcccatcctccagcagctgtttgtgtgctgcctctgaagtccacactgaacaaacttcagcctactcatgtccctaaaatgggcaaacattgcaagcagcaaacagcaaacacacagccctccctgcctgctgaccttggagctggggcagaggtcagagacctctctgggcccatgccacctccaacatccactcgaccccttggaatttcggtggagaggagcagaggttgtcctggcgtggtttaggtagtgtgagagggtccgggttcaaaaccacttgctgggtggggagtcgtcagtaagtggctatgccccgaccccgaagcctgtttccccatctgtacaatggaaatgataaagacgcccatctgatagggtttttgtggcaaataaacatttggtttttttgttttgttttgttttgttttttgagatggaggtttgctctgtggcccaggctggagtgcagtgacacaatctcatctcaccacaaccttcccctgcctcagcctcccaagtagctgggattacaagcatgtgccaccacacctggctaattttctatttttagtagagatgggtttctccatgttggtcagcctcagcctcccaagtaactgggattacaggcctgtgccaccacacctggctaattttttctatttttgacagggatggggtttcaccatgttggtcaggctggtctagaggtactggatcttgctaccagtggaacagccactaaggattctgcagtgagagcagagggccagctaagtggtactctcccagagactgtctgactcacgccaccccctccaccttggacacaggacgctgtggtttctgagccaggtacaatgactcctttcggtaagtgcagtggaagctgtacactgcccaggcaaagcgtccgggcagcgtaggcgggcgactcagatcccagccagtggacttagcccctgtttgctcctctgataactggggtgaccttggttaatattcaccagcagcctcccccgttgcccctctggatccactgcttaaatacagacgaggacagg

SEQ ID NO: 1009 - DNA, 103 bp, Artificial Sequence
  Description of Artificial Sequence: Synthetic polynucleotide
taacaaacaccattgtcacactccatcaccaaacaccattgtcacactccacgatcaaacaccattgtcacactccatcaccaaacaccattgtcacactcca

SEQ ID NO: 1010 - DNA, 77 bp, Artificial Sequence
  Description of Artificial Sequence: Synthetic oligonucleotide
tccataaagtaggaaacactacacgattccataaagtaggaaacactacatcactccataaagtaggaaacactaca

SEQ ID NO: 1011 - DNA, 1359 bp, Artificial Sequence
  Description of Artificial Sequence: Synthetic polynucleotide
atgagcaccgccgtgctggaaaatcctggcctgggcagaaagctgagcgacttcggccaagagacaagctacatcgaggacaactgcaaccagaacggcgccatcagcctgatcttcagcctgaaagaagaagtgggcgccctggccaaggtgctgagactgttcgaagagaacgacgtgaacctgacacacatcgagagcgcgcccagcagactgaagaaggacgagtacgagttcttcacccacctggacaagcggagcctgcctgctctgaccaacatcatcaagatcctgcggcacgacatcggcgccacagtgcacgaactgagccgggacaagaaaaaggacaccgtgccatggttccccagaaccatccaagagctggacagattcgccaaccagatcctgagctatggcgccgagctggacgctgatcaccctggctttaaggaccccgtgtaccgggccagaagaaagcagtttgccgatatcgcctacaactaccggcacggccagcctattcctcgggtcgagtacatggaagaggaaaagaaaacctggggcaccgtgttcaagaccctgaagtccctgtacaagacccacgcctgctacgagtacaaccacatcttcccactgctcgaaaagtactgcggcttccacgaggacaatatccctcagcttgaggacgtgtcccagttcctgcagacctgcaccggctttagactgaggccagttgccggactgctgagcagcagagattttctcggcggcctggccttcagagtgttccactgtacccagtacatcagacacggcagcaagcccatgtacacccctgagcctgatatctgccacgagctgctgggacatgtgcccctgttcagcgatagaagcttcgcccagttcagccaagagatcggactggcttctctgggagcccctgacgagtacattgagaagctggccaccatctactggttcaccgtggaattcggcctgtgcaagcagggcgacagcatcaaagcttatggcgctggcctgctgtctagcttcggcgagctgcagtactgtctgagcgagaagcctaagctgctgcccctggaactggaaaagaccgccatccagaactacaccgtgaccgagttccagcctctgtactacgtggccgagagcttcaacgacgccaaagaaaaagtgcggaacttcgccgccaccattcctcggcctttcagcgtcagatacgacccctacacacagcggatcgaggtgctggacaacacacagcagctgaaaattctggccgactccatcaacagcgagatcggcatcctgtgcagcgccctgcagaaaatcaagtga

SEQ ID NO: 1012 - DNA, 1359 bp, Artificial Sequence
  Description of Artificial Sequence: Synthetic polynucleotide
atgtccaccgccgtgctggagaaccctggcctgggcagaaagctgtctgactttggccaggagacctcctacatcgaggacaactgcaaccagaatggagccatctccctgatcttctccctgaaggaggaggtgggagccctggccaaggtgctgagactgtttgaggagaatgatgtgaacctgacccacatcgagtccagaccctccagactgaagaaggatgagtatgagttcttcacccacctggacaagagatccctgcctgccctgaccaacatcatcaagatcctgagacacgacattggagccaccgtgcacgagctgtccagagacaagaagaaggacaccgtgccctggttccccagaaccatccaggagctggacagatttgccaaccagatcctgtcctatggagccgagctggatgccgaccaccctggcttcaaggaccctgtgtacagagccagaagaaagcagtttgccgacattgcctacaactacagacacggccagcccatccccagagtggagtacatggaggaggagaagaagacctggggcaccgtgttcaagaccctgaagtccctgtacaagacccacgcctgctatgagtacaaccacatcttccccctgctggagaagtactgtggcttccacgaggacaacatcccccagctggaggatgtgtcccagttcctgcagacctgcaccggcttcagactgagacctgtggccggcctgctgtcctccagagacttcctgggaggcctggccttcagagtgttccactgcacccagtacatcagacacggctccaagcccatgtacacccctgagcctgacatctgccacgagctgctgggccacgtgcccctgttctctgacagatcctttgcccagttctcccaggagattggcctggcctccctgggagcccctgatgagtacattgagaagctggccaccatctactggttcaccgtggagtttggcctgtgcaagcagggagactccatcaaggcctatggagccggcctgctgtcctcctttggagagctgcagtactgcctgtctgagaagcccaagctgctgcccctggagctggagaagaccgccatccagaactacaccgtgaccgagttccagcccctgtactatgtggccgagtccttcaatgatgccaaggagaaggtcagaaactttgccgccaccatccccagacccttctctgtgagatatgacccctacacccagagaatcgaggtgctggacaacacccagcagctgaagatcctggccgactccatcaactctgagatcggcatcctgtgctctgccctgcagaagatcaagtaa

SEQ ID NO: 1013 - DNA, 1359 bp, Artificial Sequence
  Description of Artificial Sequence: Synthetic polynucleotide
atgagcaccgccgtgctggaaaaccccggtctgggcaggaagctgtccgactttggccaggagacctcctacatcgaggacaactgcaaccagaacggggccatctccctgatcttctccctgaaggaggaggtgggggccctggccaaggtgctgaggctgttcgaggagaacgacgttaacctgacccacatcgagagccggcccagcagactgaagaaggacgagtacgagttcttcacccacctggacaagagaagcctgcccgccctgaccaacatcattaagatcctgaggcacgacatcggagccacagtgcatgagctctccagagacaagaagaaggacaccgtgccctggttcccccgcaccatccaggagctggacaggttcgccaaccagatcctgagctatggggccgagctggatgccgaccaccctggcttcaaggacccagtgtaccgcgccaggcggaagcagttcgccgacattgcctacaattaccggcacggccagcccatcccccgggtggagtacatggaggaggagaagaagacctgggggaccgtgttcaagaccctgaaaagcctgtacaagacccacgcctgctacgagtacaaccacatcttccccctgctggagaagtactgtggattccacgaggataacatcccccagctggaggatgtgtcccagttcctgcagacatgcacaggctttaggctgaggcctgtcgccggcctcctgtccagcagagacttcctgggcgggctggccttccgcgtgttccactgcacccagtacatcaggcacggcagcaagcccatgtacaccccagagcctgacatctgtcacgagctgctgggccacgtgcccctgttctctgacagatcctttgcacagttcagccaggagatcggcttggcctccctgggggcccccgacgaatatatcgagaagctggccaccatctactggttcaccgtggagttcggactgtgcaagcaaggagacagcatcaaggcctacggcgctggcctgctgtccagctttggagagctgcagtactgcctgtctgagaagcccaagctgctgccactggagctggagaagaccgccatccagaactacaccgtgacagagttccagcccctgtactacgtggccgagagcttcaatgacgccaaggagaaggtgaggaacttcgctgccaccatccctcgccccttcagcgtgaggtatgacccctacacccagagaatcgaggtgctggacaacacccagcagctgaagatcctggctgacagcatcaacagcgagatcggcatcctgtgctccgccctgcagaagatcaagtaa

SEQ ID NO: 1014 - DNA, 1359 bp, Artificial Sequence
  Description of Artificial Sequence: Synthetic polynucleotide
atgagcacagcagtactagaaaacccaggattaggcaggaagttgtctgactttggccaggagacctcctacattgaagacaactgcaaccagaatggtgccatctccttgatcttcagcctgaaggaggaggtgggagctctggccaaggtgctgaggctgtttgaggagaatgatgtgaacctgacccacattgagtccaggcccagtaggctgaagaaggatgagtatgagttcttcacccacctggacaagagatccctgccagctctgaccaacatcatcaagatcctgagacatgacattggggccacagtgcatgagctgagcagggacaagaagaaggacacagtgccctggttccccagaaccatccaggagctggacaggtttgccaaccagatcctgtcctatggagctgagctggatgcagaccaccctggcttcaaggacccagtgtacagggccagaaggaagcagtttgctgatattgcctacaactacaggcatggccagcccatcccaagggtggagtacatggaggaggagaagaagacctggggcacagtgttcaagacactgaagtccctgtacaagacccatgcttgctatgagtataaccacatcttccctctcctggagaaatactgtggcttccatgaggacaacatccctcagctggaggatgtgagtcagttcctgcagacatgcactggcttcaggctgaggcctgtggctggactcctgagcagcagggacttcctgggaggcttggccttcagggtgttccactgcacccagtatatcaggcatggctccaagcctatgtacaccccagagcctgacatctgccatgagctgctggggcatgtgcccctgttctctgacaggagctttgcccagttcagccaggagattggcctggcctccctgggggctccagatgagtacattgagaagctggctaccatctactggtttacagtggagtttgggctgtgcaagcagggggacagcatcaaggcctatggggctgggctgctgtcctcctttggagagctgcagtactgcctgtctgagaagcccaagctcctccccctggagctggagaagactgccatccagaactacactgtgacagagttccagcccctgtactatgtggctgagtccttcaatgatgccaaggagaaggtgaggaactttgctgccaccatccccaggcccttctcagtgagatatgacccctacacccagaggattgaggtgctggacaacacccagcagctgaagatcctggcagacagcatcaactctgagattggaatcctgtgctctgccctgcagaagatcaagtaa

SEQ ID NO: 1015 - DNA, 1588 bp, Artificial Sequence
  Description of Artificial Sequence: Synthetic polynucleotide
atgagtacagcagtgttagagaatccaggcctaggtagaaagctgtctgactttggccaggtgagccagggcagcctgagctgctcagttaggggaatttgggcctccagagaaagagatctgaagactgctggtgcttcctggtttcataagctcagtaagaagtctgaattcattggaagctgatgatagaagaaagagttcatgcttgctttgtccatggaggtttaacaggaatgaattgctaaactgtggaaaatgttttaaacaaatgcatcttatcctgtaggagacctcctacattgaggacaactgcaaccagaatggagccatcagcctgatcttcagcctgaaggaggaggtgggagccctggccaaggtgctgagactgtttgaggagaatgatgtgaacctgacccacattgagtccagaccctccagactgaagaaggatgagtatgagttcttcacccacctggacaagagatccctgcctgctctgaccaacatcatcaagatcctgagacatgatattggagccacagtgcatgagctgagcagggacaagaagaaggacacagtgccttggttccccagaaccatccaggagctggacaggtttgccaaccagatcctgtcctatggagctgagctggatgctgaccaccctggatttaaggatcctgtgtacagggccagaaggaagcagtttgctgacattgcctacaactacaggcatggccagcccatccccagggtggagtacatggaggaggagaagaagacctggggcactgtgttcaagaccctgaagagcctgtacaagacccatgcctgctatgagtacaaccacatcttccccctgctggagaagtactgtggcttccatgaggacaacatccctcagctggaggatgtgtcccagttcctgcagacctgcacaggcttcagactgagacctgtggctggcctgctgtctagcagagacttcctgggaggcctggccttcagagtgttccactgcacccagtacatcagacatggaagcaagcccatgtacacccctgagccagacatctgccatgagctgctgggccatgtgcccctgttctctgatagatcctttgcccagttcagccaggagattggcctggccagcctgggagcccctgatgagtacattgagaagctggccaccatctactggttcacagtggagtttggcctgtgcaagcagggagactccatcaaggcctatggagctggactgctgtcctcctttggagagctgcagtactgcctgtctgagaagcccaagctgctgcccctggagctggagaagacagccatccagaactacacagtgacagagttccagcccctgtactatgtggctgagagcttcaatgatgccaaggagaaggtgagaaactttgctgccaccatccccagacccttctctgtgaggtatgacccctacacccagaggattgaggtgctggacaacacccagcagctgaagatcctggctgactccatcaactctgagattggcatcctgtgctctgccctgcagaagatcaagtaa

SEQ ID NO: 1016-1017 - skipped (2 entries)

SEQ ID NO: 1018 - DNA, 10 bp, Artificial Sequence
  Description of Artificial Sequence: Synthetic oligonucleotide
gggactttcc

SEQ ID NO: 1019 - DNA, 11 bp, Artificial Sequence
  Description of Artificial Sequence: Synthetic oligonucleotide
ggggactttcc

SEQ ID NO: 1020 - skipped

SEQ ID NO: 1021 - DNA, 1363 bp, Artificial Sequence; identical to SEQ ID NO: 383
  Description of Artificial Sequence: Synthetic polynucleotide

SEQ ID NO: 1022 - DNA, 428 bp, Artificial Sequence
  Description of Artificial Sequence: Synthetic polynucleotide
atgagcaccgccgtgctggaaaatcctggcttgggcaggaaactctctgactttggacaggtgagccacggcagcctgagctgctcagttaggggaatttgggcctccagagaaagagatccgaagactgctggtgcttcctggtttcataagctcagtaagaagtctgaattcgttggaagctgatgatagaagaaagagttcatgcttgctttgtccatggaggtttaacaggaatgaattgctaaactgtggaaaatgttttaaacaaatgcatcttatcctgtaggaaacaagctatattgaagacaactgcaatcaaaacggcgccatcagcctgatcttcagcctgaaagaagaagtgggcgccctggccaaggtgctgagactgttcgaagagaacgacgtgaacctgacacacatcgaga

SEQ ID NO: 1023 - DNA, 186 bp, Artificial Sequence
  Description of Artificial Sequence: Synthetic polynucleotide
atgagcaccgccgtgctggaaaatcctggcctgggcagaaagctgagcgacttcggccaggtgagccagggcagcctgagctgctcagttaggggaatttgggcctccagagaaagagatcccaagactgctggtgcttcctggtttcataagctcagtaagaagtctgaattggttggaagctga

SEQ ID NO: 1024 - DNA, 186 bp, Artificial Sequence
  Description of Artificial Sequence: Synthetic polynucleotide
agttcatgcttgctttgtccatgtaggtttaacaggaatgaattgctaaactgtggaaaatgttttaaacaaatgcatcttatcctgtaggagacaagctacatcgaggacaactgcaaccagaacggcgccatcagcctgatcttcagcctgaaagaagaagtgggcgccctggccaaggtgctg

SEQ ID NO: 1025 - protein, 450 aa, Artificial Sequence
  Description of Artificial Sequence: Synthetic polypeptide
MSTAVLENPGLGRKLSDFGQETSYIEDNCNQNGAISLIFSLKEEVGALAKVLRLFEENDVNLTHIESRPSRLKKDEYEFFTHLDKRSLPALTNIIKILRHDIGATVHELSRDKKKDTVPWFPRTIQELDRFANQILSYGAELDADHPGFKDPVYRARRKQFADIAYNYRHGQPIPRVEYMEEEKKTWGTVFKTLKSLYKTHACYEYNHIFPLLEKYCGFHEDNIPQLEDVSQFLQTCTGFRLRPVAGLLSSRDFLGGLAFRVFHCTQYIRHGSKPMYTPEPDICHELLGHVPLFSDRSFAQFSQEIGLASLGAPDEYIEKLATIYWFTVEFGLCKQGDSIKAYGAGLLSSFGELQYCLSEKPKLLPLELEKTAIQNYTVTEFQPLYYVAESFNDAKEKVRNFAATIPRPFSVRYDPYTQRIEVLDNTQQLKILADSINSEIGILCSALQK

SEQ ID NO: 1026 - DNA, 91 bp, Artificial Sequence
  Description of Artificial Sequence: Synthetic oligonucleotide
aagaggtaagggtttaagggatggttggttggtggggtattaatgtttaattacctggagcacctgcctgaaatcactttttttcaggttg

1. A closed-ended DNA (ceDNA) vector comprising:
at least one nucleic acid sequence that encodes at least one phenylalanine hydroxylase (PAH) protein, wherein the at least one nucleic acid sequence is selected from a sequence having at least 90% identity to any of the sequences listed in Table 1A, wherein the at least one nucleic acid sequence is codon optimized, and wherein the at least one nucleic acid sequence is located between flanking inverted terminal repeats (ITRs); and
a promoter operatively linked to the least one nucleotide sequence that encodes the at least one PAH protein, wherein the promoter is selected from the group consisting of the VD promoter, the human alpha 1-antitrypsin (hAAT) promoter (including the hAAT(979) promoter and the CpGmin_hAAT promoter) and the transthyretin (TTR) liver specific promoter.

2. The ceDNA vector of claim 1, wherein the at least one nucleic acid sequence encoding the at least one PAH protein is selected from a sequence having at least 95% identity to any one of the sequences set forth in Table 1A.

3. A closed-ended DNA (ceDNA) vector comprising:
a nucleic acid sequence that encodes at least one PAH protein, wherein the nucleic acid sequence is selected from a sequence having at least 95% identity to any of the sequences listed in Table 1A, wherein the at least one nucleic acid sequence is located between flanking inverted terminal repeats (ITRs); and
a promoter operatively linked to the nucleic acid sequence that encodes the at least one PAH protein, wherein the promoter is selected from the group consisting of the VD promoter, the human alpha 1-antitrypsin (hAAT) promoter and the transthyretin (TTR) liver specific promoter.

4. A closed-ended DNA (ceDNA) vector comprising:
a nucleic acid sequence that encodes at least one PAH protein, wherein the nucleic acid sequence is selected from a sequence having at least 96% identity to any of the sequences listed in Table 1A, wherein the at least one nucleic acid sequence is located between flanking inverted terminal repeats (ITRs); and
a promoter operatively linked to the nucleic acid sequence that encodes the at least one PAH protein, wherein the promoter is selected from the group consisting of the VD promoter, the human alpha 1-antitrypsin (hAAT) promoter and the transthyretin (TTR) liver specific promoter.

5. A closed-ended DNA (ceDNA) vector comprising:
a nucleic acid sequence that encodes at least one PAH protein, wherein the nucleic acid sequence is selected from a sequence having at least 97% identity to any of the sequences listed in Table 1A, wherein the at least one nucleic acid sequence is located between flanking inverted terminal repeats (ITRs); and
a promoter operatively linked to the nucleic acid sequence that encodes the at least one PAH protein, wherein the promoter is selected from the group consisting of the VD promoter, the human alpha 1-antitrypsin (hAAT) promoter and the transthyretin (TTR) liver specific promoter.

6. A closed-ended DNA (ceDNA) vector comprising:
a nucleic acid sequence that encodes at least one PAH protein, wherein the nucleic acid sequence is selected from a sequence having at least 98% identity to any of the sequences listed in Table 1A, wherein the at least one nucleic acid sequence is located between flanking inverted terminal repeats (ITRs); and
a promoter operatively linked to the nucleic acid sequence that encodes the at least one PAH protein, wherein the promoter is selected from the group consisting of the VD promoter, the human alpha 1-antitrypsin (hAAT) promoter and the transthyretin (TTR) liver specific promoter.

7. A closed-ended DNA (ceDNA) vector comprising:
a nucleic acid sequence that encodes at least one PAH protein, wherein the nucleic acid sequence is selected from a sequence having at least 99% identity to any of the sequences listed in Table 1A, wherein the at least one nucleic acid sequence is located between flanking inverted terminal repeats (ITRs); and
a promoter operatively linked to the nucleic acid sequence that encodes the at least one PAH protein, wherein the promoter is selected from the group consisting of the VD promoter, the human alpha 1-antitrypsin (hAAT) promoter and the transthyretin (TTR) liver specific promoter.

8. The ceDNA vector of any one of claims 1-7, wherein the at least one nucleic acid sequence encoding the at least one PAH protein is a sequence having at least 98% identity to the sequence set forth as SEQ ID NO:382.

9. The ceDNA vector of any one of claims 1-7, wherein the at least one nucleic acid sequence encoding the at least one PAH protein is a sequence having at least 99% identity to the sequence set forth as SEQ ID NO:382.

10. The ceDNA vector of any one of claims 1-7, wherein the at least one nucleic acid sequence encoding the at least one PAH protein is set forth as SEQ ID NO:382.

11. The ceDNA vector of any one of claims 1-7, wherein the at least one nucleic acid sequence encoding the at least one PAH protein is a sequence having at least 99% identity to the sequence set forth as SEQ ID NO:425.

12. The ceDNA vector of any one of claims 1-7, wherein the at least one nucleic acid sequence encoding the at least one PAH protein is set forth as SEQ ID NO:425.

13. The ceDNA vector of any one of claims 1-7, wherein the at least one nucleic acid sequence encoding the at least one PAH protein is a sequence having at least 99% identity to the sequence set forth as SEQ ID NO:431.

14. The ceDNA vector of any one of claims 1-7, wherein the at least one nucleic acid sequence encoding the at least one PAH protein is set forth as SEQ ID NO:431.

15. The ceDNA vector of any one of claims 1-7, wherein the at least one nucleic acid sequence encoding the at least one PAH protein is a sequence having at least 99% identity to the sequence set forth as SEQ ID NO:435.

16. The ceDNA vector of any one of claims 1-7, wherein the at least one nucleic acid sequence encoding the at least one PAH protein is set forth as SEQ ID NO:435.

17. The ceDNA vector of any one of claims 1-7, wherein the promoter comprises a nucleic acid sequence having at least 85% identity to SEQ ID NO: 191.

18. The ceDNA vector of any one of claims 1-7, wherein the promoter comprises a nucleic acid sequence having at least 98% identity to SEQ ID NO: 443.

19. The ceDNA vector of any one of claims 1-7, wherein the promoter comprises a nucleic acid sequence having at least 99% identity to SEQ ID NO: 444.

20. The ceDNA vector of any one of claims 1-7, wherein the promoter comprises a nucleic acid sequence having at least 99% identity to SEQ ID NO: 445.

21. The ceDNA vector of any one of claims 1-7, wherein the promoter comprises a nucleic acid sequence having at least 99% identity to SEQ ID NO: 446.

22. The ceDNA vector of any one of claims 1-7, wherein the promoter comprises a nucleic acid sequence having at least 96% identity to SEQ ID NO: 447.

23. The ceDNA vector of any of claims 1 to 22, wherein the ceDNA vector further comprises an enhancer.

24. The ceDNA vector of claim 23, wherein the enhancer is selected from the group consisting of a serpin enhancer, a 3×HNF1-4_ProEnh_10mer, and a 5×HNF1_ProEnh_10mer.

25. The ceDNA vector of claim 23, wherein the enhancer comprises a nucleic acid sequence having at least 85% identity to SEQ ID NO: 450.

26. The ceDNA vector of claim 23, wherein the enhancer comprises a nucleic acid sequence having at least 85% identity to SEQ ID NO: 586.

27. The ceDNA vector of claim 23, wherein the enhancer comprises a nucleic acid sequence having at least 85% identity to SEQ ID NO: 587.

28. The ceDNA vector of claim any one of claims 1-7, wherein the promoter is a promoter set that comprises a nucleic acid sequence having at least 85% identity to SEQ ID NO: 462.

29. The ceDNA vector of claim any one of claims 1-7, wherein the promoter is a promoter set that comprises a nucleic acid sequence having at least 85% identity to SEQ ID NO: 467.

30. The ceDNA vector of claim any one of claims 1-7, wherein the promoter is a promoter set that comprises a nucleic acid sequence having at least 85% identity to SEQ ID NO: 470.

31. The ceDNA vector of claim any one of claims 1-7, wherein the promoter is a promoter set that comprises a nucleic acid sequence having at least 90% identity to SEQ ID NO: 470.

32. The ceDNA vector of claim any one of claims 1-7, wherein the promoter is a promoter set that comprises a nucleic acid sequence having at least 95% identity to SEQ ID NO: 470.

33. The ceDNA vector of any of claims 1 to 32, wherein the ceDNA vector further comprises one or more introns.

34. The ceDNA vector of claim 33, wherein the one or more introns is the minute virus of mice (MVM).

35. The ceDNA vector of any of claims 1 to 34, wherein the ceDNA vector comprises a 3′ untranslated region (3′ UTR).

36. The ceDNA vector of any of claims 1 to 35, wherein the ceDNA vector comprises at least one polyA sequence.

37. The ceDNA vector of any one of claims 1-7, wherein the VD promoter comprises a SERP enhancer.

38. The ceDNA vector of any one of claims 1-7, wherein the VD promoter comprises a 3×SERP enhancer.

39. The ceDNA vector of any one of claims 1-7, wherein the promoter is the TTR liver promoter and the ceDNA further comprises an MVM intron.

40. The ceDNA vector of any one of claims 1-39, wherein the ceDNA vector comprises a nucleic acid sequence that is at least 90% identical to a nucleic acid sequence selected from the group consisting of: SEQ ID NO: 194, SEQ ID NO: 195, SEQ ID NO: 196, SEQ ID NO: 197, SEQ ID NO: 198, SEQ ID NO: 199, SEQ ID NO: 200, SEQ ID NO: 201, SEQ ID NO: 202, SEQ ID NO: 203, SEQ ID NO: 204, SEQ ID NO: 205, SEQ ID NO: 206, SEQ ID NO: 207, SEQ ID NO: 208, SEQ ID NO: 209, SEQ ID NO: 210, SEQ ID NO: 211, SEQ ID NO: 212, SEQ ID NO: 213, SEQ ID NO: 541, SEQ ID NO: 542, SEQ ID NO: 543, SEQ ID NO: 544, SEQ ID NO: 545, SEQ ID NO: 546, SEQ ID NO: 547, SEQ ID NO: 548, SEQ ID NO: 549, SEQ ID NO: 550, SEQ ID NO: 551, SEQ ID NO: 552, SEQ ID NO: 553, SEQ ID NO: 554, SEQ ID NO: 555, SEQ ID NO: 556, SEQ ID NO: 557, SEQ ID NO: 558, SEQ ID NO: 559, SEQ ID NO: 560, SEQ ID NO: 561, SEQ ID NO: 562, SEQ ID NO: 563, SEQ ID NO: 564, SEQ ID NO: 565, SEQ ID NO: 566, SEQ ID NO: 567, SEQ ID NO: 570, SEQ ID NO: 571, SEQ ID NO: 572, SEQ ID NO:573, SEQ ID NO: 574, SEQ ID NO: 575, SEQ ID NO: 576, SEQ ID NO: 577, SEQ ID NO: 578, SEQ ID NO: 579, SEQ ID NO:580, SEQ ID NO: 581, SEQ ID NO: 582, SEQ ID NO:583, and SEQ ID NO:584.

41. The ceDNA vector of any one of claims 1-40, wherein at least one nucleic acid sequence is cDNA for PAH.

42. The ceDNA vector of any one of claims 1-41, wherein at least one ITR comprises a functional terminal resolution site (TRS) and a Rep binding site.

43. The ceDNA vector of any one of claims 1-42, wherein one or both of the ITRs are from a virus selected from a parvovirus, a dependovirus, and an adeno-associated virus (AAV).

44. The ceDNA vector of any one of claims 1-43, wherein the flanking ITRs are symmetric or asymmetric.

45. The ceDNA vector of claim 44, wherein the flanking ITRs are symmetrical or substantially symmetrical.

46. The ceDNA vector of claim 45, wherein the flanking ITRs are asymmetric.

47. The ceDNA vector of any one of claims 1-46, wherein one or both of the ITRs are wild type, or wherein both of the ITRs are wild-type.

48. The ceDNA vector of any one of claims 1-47, wherein both of the ITRs are wild-type of the same AAV.

49. The ceDNA vector of claim 48, wherein both of the ITRs are wild-type of AAV2.

50. The ceDNA vector of any one of claims 1-49, wherein the flanking ITRs are from different viral serotypes.

51. The ceDNA vector of any one of claims 1-50, wherein the flanking ITRs are from a pair of viral serotypes shown in Table 2.

52. The ceDNA vector of any one of claims 1-51, wherein one or both of the ITRs comprises a sequence selected from the sequences in Table 3, Table 5A, Table 5B, or Table 6.

53. The ceDNA vector of any one of claims 1-52, wherein at least one of the ITRs is altered from a wild-type AAV ITR sequence by a deletion, addition, or substitution that affects the overall three-dimensional conformation of the ITR.

54. The ceDNA vector of any one of claims 1-53, wherein one or both of the ITRs are derived from an AAV serotype selected from AAV1, AAV2, AAV3, AAV4, AAV5, AAV6, AAV7, AAV8, AAV9, AAV10, AAV11, and AAV12.

55. The ceDNA vector of any one of claims 1-54, wherein one or both of the ITRs are synthetic.

56. The ceDNA vector of any one of claims 1-55, wherein one or both of the ITRs is not a wild type ITR, or wherein both of the ITRs are not wild-type.

57. The ceDNA vector of any one of claims 1-56, wherein one or both of the ITRs is modified by a deletion, insertion, and/or substitution in at least one of the ITR regions selected from A, A′, B, B′, C, C′, D, and D′.

58. The ceDNA vector of claim 57, wherein the deletion, insertion, and/or substitution results in the deletion of all or part of a stem-loop structure normally formed by the A, A′, B, B′ C, or C′ regions.

59. The ceDNA vector of any one of claims 1-58, wherein one or both of the ITRs are modified by a deletion, insertion, and/or substitution that results in the deletion of all or part of a stem-loop structure normally formed by the B and B′ regions.

60. The ceDNA vector of any one of claims 1-59, wherein one or both of the ITRs are modified by a deletion, insertion, and/or substitution that results in the deletion of all or part of a stem-loop structure normally formed by the C and C′ regions.

61. The ceDNA vector of any one of claims 1-60, wherein one or both of the ITRs are modified by a deletion, insertion, and/or substitution that results in the deletion of part of a stem-loop structure normally formed by the B and B′ regions and/or part of a stem-loop structure normally formed by the C and C′ regions.

62. The ceDNA vector of any one of claims 1-61, wherein one or both of the ITRs comprise a single stem-loop structure in the region that normally comprises a first stem-loop structure formed by the B and B′ regions and a second stem-loop structure formed by the C and C′ regions.

63. The ceDNA vector of any one of claims 1-62, wherein one or both of the ITRs comprise a single stem and two loops in the region that normally comprises a first stem-loop structure formed by the B and B′ regions and a second stem-loop structure formed by the C and C′ regions.

64. The ceDNA vector of any one of claims 1-63, wherein one or both of the ITRs comprise a single stem and a single loop in the region that normally comprises a first stem-loop structure formed by the B and B′ regions and a second stem-loop structure formed by the C and C′ regions.

65. The ceDNA vector of any one of claims 1-64, wherein both ITRs are altered in a manner that results in an overall three-dimensional symmetry when the ITRs are inverted relative to each other.

66. The ceDNA vector of any one of claims 1-65, wherein the ceDNA vector comprises a nucleic acid sequence that is at least 90% identical to SEQ ID NO: 382, SEQ ID NO:383, SEQ ID NO: 384, SEQ ID NO: 385 or SEQ ID NO:386.

67. The ceDNA vector of any one of claims 1-65, wherein the ceDNA vector comprises a nucleic acid sequence that is at least 95% identical to SEQ ID NO: 382, SEQ ID NO:383, SEQ ID NO: 384, SEQ ID NO: 385 or SEQ ID NO:386.

68. The ceDNA vector of any one of claims 1-65, wherein the ceDNA vector comprises a nucleic acid sequence that is at least 96% identical to SEQ ID NO: 382, SEQ ID NO:383, SEQ ID NO: 384, SEQ ID NO: 385 or SEQ ID NO:386.

69. The ceDNA vector of any one of claims 1-65, wherein the ceDNA vector comprises a nucleic acid sequence that is at least 97% identical to SEQ ID NO: 382, SEQ ID NO:383, SEQ ID NO: 384, SEQ ID NO: 385 or SEQ ID NO:386.

70. The ceDNA vector of any one of claims 1-65, wherein the ceDNA vector comprises a nucleic acid sequence that is at least 98% identical to SEQ ID NO: 382, SEQ ID NO:383, SEQ ID NO: 384, SEQ ID NO: 385 or SEQ ID NO:386.

71. The ceDNA vector of any one of claims 1-65, wherein the ceDNA vector comprises a nucleic acid sequence that is at least 99% identical to SEQ ID NO: 382, SEQ ID NO:383, SEQ ID NO: 384, SEQ ID NO: 385 or SEQ ID NO:386.

72. A method of expressing a PAH protein in a cell, the method comprising contacting the cell with the ceDNA vector of any one of claims 1-71.

73. The method of claim 72, wherein the cell is a photoreceptor cell or a retinal pigment epithelial (RPE) cell.

74. The method of claim 72 or 73, wherein the cell in in vitro or in vivo.

75. A method of treating a subject with phenylketonuria (PKU), the method comprising administering to the subject a ceDNA vector of any one of claims 1-71.

76. The method of claim 75, wherein the least one nucleic acid sequence that encodes at least one PAH protein is selected from a sequence having at least 90% identity with any of the sequences set forth in Table 1A.

77. The method of any one of claims 72-76, wherein the subject exhibits at least about a 50% decrease in level of serum phenylalanine as compared to a level of serum phenylalanine in the subject prior to administration.

78. The method of any one of claims 72-77, wherein the subject exhibits at least about a 10% increase in PAH activity after administration as compared to a level of PAH activity prior to administration.

79. The method of any one of claims 72-78, wherein the ceDNA vector is formulated in lipid nanoparticles.

80. The method of any one of claims 72-79, wherein the ceDNA vector is administered intravenously.

81. The method of any one of claims 72-79, wherein the ceDNA vector is administered intramuscularly.

82. The method of any one of claims 72-79, wherein the ceDNA vector is administered by infusion.

83. A pharmaceutical composition comprising the ceDNA vector of any one of claims 1-71.

84. A composition comprising a ceDNA vector of any of claims 1-71 and a lipid.

85. The composition of claim 84, wherein the lipid is a lipid nanoparticle (LNP).

86. A kit comprising the ceDNA vector of any one of claims 1-71, the pharmaceutical composition of claim 83, or the composition of claim 84 or 85.
